(19) United States
(12) Patent Application Publication
(10) Pub. No.: US 2014/0057323 A1
(43) Pub. Date: Feb. 27, 2014

(54) ENHANCED CELLODEXTRIN METABOLISM

(71) Applicants: James H. Doudna Cate, Berkeley, CA (US); Yong-Su Jin, Champaign, IL (US); Jonathan M. Galazka, Berkeley, CA (US); Suk-Jin Ha, Savoy, IL (US)

(72) Inventors: James H. Doudna Cate, Berkeley, CA (US); Yong-Su Jin, Champaign, IL (US); Jonathan M. Galazka, Berkeley, CA (US); Suk-Jin Ha, Savoy, IL (US)

(73) Assignees: The Board of Trustees of the University of Illinois, Urbana, IL (US); The Regents of the University of California, Oakland, CA (US)

(21) Appl. No.: 13/982,248

(22) PCT Filed: Feb. 7, 2012
(86) PCT No.: PCT/US2012/024186

§ 371 Date: Oct. 23, 2013

Related U.S. Application Data
(60) Provisional application No. 61/440,305, filed on Feb. 7, 2011.
(60) Provisional application No. 61/566,548, filed on Dec. 2, 2011.

(51) Int. Cl. C12P 19/18; C12P 19/02

(52) U.S. Cl. CPC C12P 19/18; C12P 19/02
USPC 435/97; 435/254.21

(57) ABSTRACT

The present disclosure relates to host cells containing two or more of a recombinant cellodextrin transporter, a recombinant cellodextrin phosphorylase, a recombinant β-glucosidase, a recombinant phosphoglucomutase, or a recombinant hexokinase; and to methods of using such cells for degrading cellodextrin, for producing hydrocarbons or hydrocarbon derivatives from cellodextrin, and for reducing ATP consumption during glucose utilization.

### CROSS-REFERENCE TO RELATED APPLICATIONS

[0001] This application claims the benefit of U.S. Provisional Application No. 61/440,305, filed Feb. 7, 2011, and U.S. Provisional Application No. 61/566,548, filed Dec. 2, 2011, both of which are hereby incorporated by reference in their entirety.

### SUBMISSION OF SEQUENCE LISTING AS ASCII TEXT FILE

[0002] The content of the following submission on ASCII text file is incorporated herein by reference in its entirety: a computer readable form (CRF) of the Sequence Listing (file name: 677792001340SeqList.txt, date recorded: Feb. 6, 2012, size: 1209 KB).

### FIELD

[0003] The present disclosure relates to methods and compositions for degrading cellodextrin and for producing hydrocarbons and hydrocarbon derivatives.

### BACKGROUND

[0004] Biofuels are under intensive investigation due to increasing concerns about energy security, sustainability, and global climate change (Lynd et al., Science, 1991). Bioconversion of plant-derived lignocellulosic materials into biofuels has been regarded as an attractive alternative to chemical production of fossil fuels (Lynd et al., Nat Biotech, 2008; Hahn-Hagerdal et al., Biotechnol Biofuels, 2006). The engineering of microorganisms to perform the conversion of lignocellulosic biomass to ethanol efficiently remains a major goal of the biofuels field. Much research has been focused on genetically manipulating microorganisms that naturally ferment simple sugars to alcohol to express cellulases and other enzymes that would allow them to degrade lignocellulosic biomass polymers and generate ethanol within one cell, a process known as consolidated bioprocessing (CBP).

[0005] Saccharomyces cerevisiae, also known as baker's yeast, has been used for bioconversion of simple hexose sugars into ethanol for thousands of years. It is also the most widely used microorganism for large scale industrial fermentation of D-glucose into ethanol. S. cerevisiae is a very suitable candidate for bioconversion of lignocellulosic biomass into biofuels (van Maris et al., Antonie Van Leeuwenhoek, 2006). It has a well-studied genetic and physiological background, ample genetic tools, and high tolerance to high ethanol concentration and inhibitors present in lignocellulosic hydrolysates (Jeffries, Curr Opin Biotechnol, 2006). The low fermentation pH of S. cerevisiae can also prevent bacterial contamination during fermentation.

[0006] S. cerevisiae, however, does not naturally degrade and ferment the more complex biomass polymers, such as cellulose, that are present in plant cell walls. Enzymes useful for the degradation of biomass polymers have been sought after in those organisms that naturally degrade biomass, such as Neurospora crassa and Trichoderma reesei. A recent study of plant wall degradation in N. crassa showed that in addition to the expression of various cellulases, N. crassa expresses cellodextrin transporters and an intracellular β-glucosidase in response to cellulose (Tian et al., PNAS USA 106, 22157, 2009; Galazka et al., Science 330, 84, 2010). Cellodextrins are β (1→4) linked oligosaccharides of glucose and are the product of cellulose depolymerization by fungal cellulases (Zhang and Lynd, Biotechnol Bioeng 88, 797, 2004). β-glucosidase hydrolyzes cellodextrins to glucose.

[0007] S. cerevisiae engineered to express a cellodextrin transporter and an intracellular β-glucosidase are able to grow with cellodextrins as the sole carbon source and ferment cellobiose to ethanol efficiently (Galazka et al., Science 330, 84, 2010). However using a β-glucosidase to hydrolyze cellodextrins to glucose requires that all produced glucose be phosphorylated to glucose-6-phosphate in a reaction that consumes 1 ATP per glucose before further processing can occur. This is problematic when ATP is in short supply.

[0008] In addition, transport of cellodextrins followed by intracellular hydrolysis facilitates the co-fermentation of cellulose-derived glucose and hemicellulose-derived xylose, which S. cerevisiae is normally unable to do. However, these engineered strains may not ferment glucose with optimal metabolism because their endogenous system for detecting and responding to the presence of glucose is dependent on the extracellular level of glucose. In the engineered strains, the extracellular level of glucose is no longer tied to the level of glucose available to the cell since glucose is generated intracellularly by transporting cellodextrins into the cell and intracellularly degrading the cellodextrins to glucose.

[0009] Accordingly, a need exists for improved engineered yeast strains that can perform consolidated bioprocessing of biomass polymers to biofuels and other useful chemicals, and that consume less ATP when phosphorylating the glucose produced from the cleavage of cellodextrins.

### BRIEF SUMMARY

[0010] In order to meet the above needs, the present disclosure provides host cells containing two or more of a recombinant cellodextrin transporter, a recombinant cellodextrin phosphorylase, a recombinant β-glucosidase, a recombinant phosphoglucomutase, or a recombinant hexokinase; and methods of using such cells for degrading cellodextrin, for producing hydrocarbons or hydrocarbon derivatives from cellodextrin, and for reducing ATP consumption during cellodextrin utilization. Moreover, the present disclosure is based at least in part on the novel discovery that yeast strains engineered to express an intracellular cellodextrin phosphorylase rather than a β-glucosidase consumed less ATP in the utilization of cellodextrins and produced nearly equivalent amounts of ethanol as compared to a yeast strain that expresses a β-glucosidase. Advantageously, cellodextrin phosphorylases utilize inorganic phosphate to cleave the β-glucosidic linkage between glucose moieties in cellodextrins. The phosphorolysis reaction saves 1 ATP equivalent per cleavage reaction and results in the release of glucose-1-phosphate (FIG. 1). The resulting glucose-1-phosphate can then be converted to glucose-6-phosphate by phosphoglucomutases (FIG. 1). Moreover, the yeast can directly utilize the resulting glucose-6-phosphate for growth and fermentation.

[0011] Accordingly, certain aspects of the present disclosure relate to a method for degrading cellodextrin, by: a) providing a host cell containing a recombinant cellodextrin transporter and a recombinant polypeptide containing Y-x(2)-G-x-[KR]-E-N-[AG]-[AG]-[IV]-F-x(2)-[ANST]-[NST]-x(2)-[AIV]-x(2)-[AGT]-x(4)-[AG]-x(4)-[ADNS] (SEQ ID NO: 233), Y-Q-[CN]-M-[IV]T-F-[CN]-[FILMV]-[AS]-R-[ST]-[AS]-S-[FY]-[FY]-E-[STV]-G-x-[GS]-R-G-[IM]-G-F-R-D-S-[ACNS]-Q-D-[ILV]-[ILMV]-G-x-V-H-x-[IV]-P-[ADEST]-x-[AV]-[KR]-[AEQ]-x-[IL]-[FIL]-D (SEQ ID NO: 14), or G-x(2)-[FY]-x-N-[AGS]-x-[AS]-W-[APS]-V-[IL]-[AS]-x(2)-A-x(2)-[DE]-x-[AI]-x(3)-[LMV]-[DEN]-[ASV]-[ILV]-x(3)-L-x-T-x(2)-G-[ILV]-x(2)-[SV]-x-P-[AG] (SEQ ID NO: 15), where the recombinant polypeptide has cellodextrin phosphorylase activity; and b) culturing the host cell in a medium containing cellodextrin or a source of cellodextrin, whereby cellodextrin is transported into the cell and degraded by the recombinant polypeptide. Other aspects of the present disclosure relate to a method for producing hydrocarbons or hydrocarbon derivatives from cellodextrin, by: a) providing a host cell containing a recombinant cellodextrin transporter and a recombinant polypeptide containing Y-x(2)-G-x-[KR]-E-N-[AG]-[AG]-[IV]-F-x(2)-[ANST]-[NST]-x(2)-[AIV]-x(2)-[AGT]-x(4)-[AG]-x(4)-[ADNS] (SEQ ID NO: 233), Y-Q-[CN]-M-[IV]-T-F-[CN]-[FILMV]-[AS]-R-[ST]-[AS]-S-[FY]-[FY]-E-[STV]-G-x-[GS]-R-G-[IM]-G-F-R-D-S-[ACNS]-Q-D-[ILV]-[ILMV]-G-x-V-H-x-[IV]-P-[ADEST]-x-[AV]-[KR]-[AEQ]-x-[IL]-[FIL]-D (SEQ ID NO: 14), or G-x(2)-[FY]-x-N-[AGS]-x-[AS]-W-[APS]-V-[IL]-[AS]-x(2)-A-x(2)-[DE]-x-[AI]-x(3)-[LMV]-[DEN]-[ASV]-[ILV]-x(3)-L-x-T-x(2)-G-[ILV]-x(2)-[SV]-x-P-[AG] (SEQ ID NO: 15), where the recombinant polypeptide has cellodextrin phosphorylase activity; and b) culturing the host cell in a medium containing cellodextrin or a source of cellodextrin, whereby cellodextrin is transported into the cell and degraded by the recombinant polypeptide and whereby the host cell produces hydrocarbons or hydrocarbon derivatives from the cellodextrin. Other aspects of the present disclosure relate to a method for reducing ATP consumption during glucose utilization, by: a) providing a host cell containing a recombinant cellodextrin transporter and a recombinant polypeptide containing Y-x(2)-G-x-[KR]-E-N-[AG]-[AG]-[IV]-F-x(2)-[ANST]-[NST]-x(2)-[AIV]-x(2)-[AGT]-x(4)-[AG]-x(4)-[ADNS] (SEQ ID NO: 233), Y-Q-[CN]-M-[IV]-T-F-[CN]-[FILMV]-[AS]-R-[ST]-[AS]-S-[FY]-[FY]-E-[STV]-G-x-[GS]-R-G-[IM]-G-F-R-D-S-[ACNS]-Q-D-[ILV]-[ILMV]-G-x-V-H-x-[IV]-P-[ADEST]-x-[AV]-[KR]-[AEQ]-x-[IL]-[FIL]-D (SEQ ID NO: 14), or G-x(2)-[FY]-x-N-[AGS]-x-[AS]-W-[APS]-V-[IL]-[AS]-x(2)-A-x(2)-[DE]-x-[AI]-x(3)-[LMV]-[DEN]-[ASV]-[ILV]-x(3)-L-x-T-x(2)-G-[ILV]-x(2)-[SV]-x-P-[AG] (SEQ ID NO: 15), where the recombinant polypeptide has cellodextrin phosphorylase activity; and b) culturing the host cell in a medium containing cellodextrin or a source of cellodextrin, whereby cellodextrin is transported into the cell and degraded by the recombinant polypeptide to glucose-1-phosphate, where the production of glucose-1-phosphate from cellodextrin reduces ATP consumption as compared to a corresponding cell lacking the recombinant polypeptide. In certain embodiments that may be combined with any of the preceding embodiments, the recombinant polypeptide contains an amino acid sequence that has at least 29%, at least 30%, at least 35%, at least 40%, at least 45%, at least 50%, at least 55%, at least 60%, at least 65%, at least 70%, at least 75%, at least 80%, at least 85%, at least 90%, at least 95%, at least 99%, or at least 100% amino acid identity to the amino acid sequence of CDP_Clent, CDP_Ctherm, or CDP_Acell. In certain embodiments that may be combined with any of the preceding embodiments, the recombinant polypeptide has cellobiose phosphorylase activity. In certain embodiments, the recombinant polypeptide contains an amino acid sequence that has at least 29%, at least 30%, at least 35%, at least 40%, at least 45%, at least 50%, at least 55%, at least 60%, at least 65%, at least 70%, at least 75%, at least 80%, at least 85%, at least 90%, at least 95%, at least 99%, or at least 100% amino acid identity to an amino acid sequence selected from SEQ ID NO: 11 (CgCBP), SEQ ID NO: 12 (SdCBP), and SEQ ID NO: 13 (CtCBP). In certain embodiments that may be combined with any of the preceding embodiments, the recombinant polypeptide contains one or more mutations. In certain embodiments, the one or more mutations are amino acid substitutions. In certain embodiments that may be combined with any of the preceding embodiments, the recombinant polypeptide contains an amino acid substitution at one or more positions corresponding to positions of the amino acid sequence of SEQ ID NO: 12 (SdCBP), where the one or more amino acid substitutions are selected from an isoleucine (I) to glutamine (Q) substitution at a position corresponding to amino acid 409 of SEQ ID NO: 12; an isoleucine (I) to methionine (M) substitution at a position corresponding to amino acid 409 of SEQ ID NO: 12; an asparagine (N) to aspartate (D) substitution at a position corresponding to amino acid 482 of SEQ ID NO: 12; an asparagine (N) to threonine (T) substitution at a position corresponding to amino acid 482 of SEQ ID NO: 12; a cysteine (C) to serine (S) substitution at a position corresponding to amino acid 484 of SEQ ID NO: 12; a cysteine (C) to alanine (A) substitution at a position corresponding to amino acid 484 of SEQ ID NO: 12; a phenylalanie (F) to tryptophan (W) substitution at a position corresponding to amino acid 651 of SEQ ID NO: 12; a histidine (H) to asparagine (N) substitution at a position corresponding to amino acid 653 of SEQ ID NO: 12; a histidine (H) to alanine (A) substitution at a position corresponding to amino acid 653 of SEQ ID NO: 12; and combinations thereof. In certain embodiments that may be combined with any of the preceding embodiments, the host cell further contains a recombinant phosphoglucomutase. In certain embodiments, the recombinant phosphoglucomutase contains a conserved motif having the amino acid sequence of [GSA]-[LIVMF]-x-[LIVM]-[ST]-[PGA]-S-H-[NIC]-P (SEQ ID NO: 19). In certain embodiments that may be combined with any of the preceding embodiments, the host cell further contains a recombinant hexokinase. In certain embodiments, the recombinant hexokinase contains a conserved motif having the amino acid sequence of [LIVM]-G-F-[TN]-F-S-[FY]-P-x(5)-[LIVM]-[DNST]-x(3)-[LIVM]-x(2)-W-T-K-x-[LF] (SEQ ID NO: 20). In certain embodiments, the recombinant hexokinase is HXK1.

[0012] Some aspects of the present disclosure relate to a method for degrading cellodextrin, by: a) providing a host cell containing a recombinant cellodextrin transporter and a recombinant phosphoglucomutase; and b) culturing the host cell in a medium containing cellodextrin or a source of cellodextrin, whereby cellodextrin is transported into the cell and degraded. Other aspects of the present disclosure relate to a method for producing hydrocarbons or hydrocarbon derivatives from cellodextrin, by: a) providing a host cell containing a recombinant cellodextrin transporter and a recombinant phosphoglucomutase; and b) culturing the host cell in a medium containing cellodextrin or a source of cellodextrin, whereby cellodextrin is transported into the cell and whereby the host cell produces hydrocarbons or hydrocarbon derivatives from the transported cellodextrin. In certain embodiments that may be combined with any of the preceding embodiments, the recombinant phosphoglucomutase contains a conserved motif having the amino acid sequence of [GSA]-[LIVMF]-x-[LIVM]-[ST]-[PGA]-S-H-[NIC]-P (SEQ ID NO: 19). In certain embodiments that may be combined with any of the preceding embodiments, the host cell further contains a recombinant hexokinase. In certain embodiments, the recombinant hexokinase contains a conserved motif having the amino acid sequence of [LIVM]-G-F-[TN]-F-S-[FY]-P-x(5)-[LIVM]-[DNST]-x(3)-[LIVM]-x(2)-W-T-K-x-[LF] (SEQ ID NO: 20). In certain embodiments, the recombinant hexokinase is HXK1.

[0013] Some aspects of the present disclosure relate to a method for degrading cellodextrin, by: a) providing a host cell containing a recombinant cellodextrin transporter and a recombinant hexokinase; and b) culturing the host cell in a medium containing cellodextrin or a source of cellodextrin, whereby cellodextrin is transported into the cell and degraded. Other aspects of the present disclosure relate to a method for producing hydrocarbons or hydrocarbon derivatives from cellodextrin, by: a) providing a host cell containing a recombinant cellodextrin transporter and a recombinant hexokinase; and b) culturing the host cell in a medium containing cellodextrin or a source of cellodextrin, whereby cellodextrin is transported into the cell and whereby the host cell produces hydrocarbons or hydrocarbon derivatives from the transported cellodextrin. In certain embodiments that may be combined with any of the preceding embodiments, the recombinant hexokinase contains a conserved motif having the amino acid sequence of [LIVM]-G-F-[TN]-F-S-[FY]-P-x(5)-[LIVM]-[DNST]-x(3)-[LIVM]-x(2)-W-T-K-x-[LF] (SEQ ID NO: 20). In certain embodiments, the recombinant hexokinase is HXK1. In certain embodiments that may be combined with any of the preceding embodiments, the host cell further contains a recombinant phosphoglucomutase. In certain embodiments, the recombinant phosphoglucomutase contains a conserved motif having the amino acid sequence of [GSA]-[LIVMF]-x-[LIVM]-[ST]-[PGA]-S-H-[NIC]-P (SEQ ID NO: 19).

[0014] In certain embodiments that may be combined with any of the preceding embodiments, the host cell further contains a recombinant polypeptide containing Y-x(2)-G-x-[KR]-E-N-[AG]-[AG]-[IV]-F-x(2)-[ANST]-[NST]-x(2)-[AIV]-x(2)-[AGT]-x(4)-[AG]-x(4)-[ADNS] (SEQ ID NO: 233), Y-Q-[CN]-M-[IV]-T-F-[CN]-[FILMV]-[AS]-R-[ST]-[AS]-S-[FY]-[FY]-E-[STV]-G-x-[GS]-R-G-[IM]-G-F-R-D-S-[ACNS]-Q-D-[ILV]-[ILMV]-G-x-V-H-x-[IV]-P-[ADEST]-x-[AV]-[KR]-[AEQ]-x-[IL]-[FIL]-D (SEQ ID NO: 14), or G-x(2)-[FY]-x-N-[AGS]-x-[AS]-W-[APS]-V-[IL]-[AS]-x(2)-A-x(2)-[DE]-x-[AI]-x(3)-[LMV]-[DEN]-[ASV]-[ILV]-x(3)-L-x-T-x(2)-G-[ILV]-x(2)-[SV]-x-P-[AG] (SEQ ID NO: 15), where the recombinant polypeptide has cellodextrin phosphorylase activity. In certain embodiments, the recombinant polypeptide contains an amino acid sequence that has at least 29%, at least 30%, at least 35%, at least 40%, at least 45%, at least 50%, at least 55%, at least 60%, at least 65%, at least 70%, at least 75%, at least 80%, at least 85%, at least 90%, at least 95%, at least 99%, or at least 100% amino acid identity to the amino acid sequence of CDP_Clent, CDP_Ctherm, or CDP_Acell. In certain embodiments, the recombinant polypeptide has cellobiose phosphorylase activity. In certain embodiments, the recombinant polypeptide contains an amino acid sequence that has at least 29%, at least 30%, at least 35%, at least 40%, at least 45%, at least 50%, at least 55%, at least 60%, at least 65%, at least 70%, at least 75%, at least 80%, at least 85%, at least 90%, at least 95%, at least 99%, or at least 100% amino acid identity to an amino acid sequence selected from SEQ ID NO: 11 (CgCBP), SEQ ID NO: 12 (SdCBP), and SEQ ID NO: 13 (CtCBP). In certain embodiments that may be combined with any of the preceding embodiments, the recombinant polypeptide contains one or more mutations. In certain embodiments, the one or more mutations are amino acid substitutions. In certain embodiments that may be combined with any of the preceding embodiments, the recombinant polypeptide contains an amino acid substitution at one or more positions corresponding to positions of the amino acid sequence of SEQ ID NO: 12 (SdCBP), where the one or more amino acid substitutions are selected from an isoleucine (I) to glutamine (Q) substitution at a position corresponding to amino acid 409 of SEQ ID NO: 12; an isoleucine (I) to methionine (M) substitution at a position corresponding to amino acid 409 of SEQ ID NO: 12; an asparagine (N) to aspartate (D) substitution at a position corresponding to amino acid 482 of SEQ ID NO: 12; an asparagine (N) to threonine (T) substitution at a position corresponding to amino acid 482 of SEQ ID NO: 12; a cysteine (C) to serine (S) substitution at a position corresponding to amino acid 484 of SEQ ID NO: 12; a cysteine (C) to alanine (A) substitution at a position corresponding to amino acid 484 of SEQ ID NO: 12; a phenylalanie (F) to tryptophan (W) substitution at a position corresponding to amino acid 651 of SEQ ID NO: 12; a histidine (H) to asparagine (N) substitution at a position corresponding to amino acid 653 of SEQ ID NO: 12; a histidine (H) to alanine (A) substitution at a position corresponding to amino acid 653 of SEQ ID NO: 12; and combinations thereof. In certain embodiments that may be combined with any of the preceding embodiments, the recombinant polypeptide reduces ATP consumption as compared to a corresponding cell lacking the recombinant polypeptide. In certain embodiments that may be combined with any of the preceding embodiments, the host cell further contains a second recombinant polypeptide containing one or more sequences selected from F-x-[FYWM]-[GSTA]-x-[GSTA]-x-[GSTA](2)-[FYNH]-[NQ]-x-E-x-[GSTA] (SEQ ID NO: 18), [LIVMFSTC]-[LIVFYS]-[LIV]-[LIVMST]-E-N-G-[LIVMFAR]-[CSAGN] (SEQ ID NO: 19), and [LIVM](2)-[KR]-x-[EQKRD]-x(4)-G-[LIVMFTC]-[LIVT]-[LIVMF]-[ST]-D-x(2)-[SGADNIT] (SEQ ID NO: 20), where the second recombinant polypeptide has β-glucosidase activity. In certain embodiments, the second recombinant polypeptide contains two or more sequences selected from F-x-[FYWM]-[GSTA]-x-[GSTA]-x-[GSTA](2)-[FYNH]-[NQ]-x-E-x-[GSTA] (SEQ ID NO: 16), [LIVMFSTC]-[LIVFYS]-[LIV]-[LIVMST]-E-N-G-[LIVMFAR]-[CSAGN] (SEQ ID NO: 17), and [LIVM](2)-[KR]-x-[EQKRD]-x(4)-G-[LIVMFTC]-[LIVT]-[LIVMF]-[ST]-D-x(2)-[SGADNIT] (SEQ ID NO: 18). In certain embodiments that may be combined with any of the preceding embodiments, the second recombinant polypeptide contains an amino acid sequence that is least 29%, at least 30%, at least 35%, at least 40%, at least 45%, at least 50%, at least 55%, at least 60%, at least 65%, at least 70%, at least 75%, at least 80%, at least 85%, at least 90%, at least 95%, at least 99%, or at least 100% amino acid identical to the amino acid sequence of NCU00130.

[0015] Some aspects of the present disclosure relate to a method for degrading cellodextrin, by: a) providing a host cell containing a recombinant cellodextrin transporter and a recombinant polypeptide containing one or more sequences selected from F-x-[FYWM]-[GSTA]-x-[GSTA]-x-[GSTA](2)-[FYNH]-[NQ]-x-E-x-[GSTA] (SEQ ID NO: 18), [LIVMFSTC]-[LIVFYS]-[LIV]-[LIVMST]-E-N-G-[LIVMFAR]-[CSAGN] (SEQ ID NO: 19), and [LIVM](2)-[KR]-x-[EQKRD]-x(4)-G-[LIVMFTC]-[LIVT]-[LIVMF]-[ST]-D-x(2)-[SGADNIT] (SEQ ID NO: 20), where the recombinant polypeptide has β-glucosidase activity; and b) culturing the host cell in a medium containing cellodextrin or a source of cellodextrin, whereby cellodextrin is transported into the cell and degraded by the recombinant polypeptide. Other aspects of the present disclosure relate to a method for producing hydrocarbons or hydrocarbon derivatives from cellodextrin, by: a) providing a host cell containing a recombinant cellodextrin transporter and a recombinant polypeptide containing one or more sequences selected from F-x-[FYWM]-[GSTA]-x-[GSTA]-x-[GSTA](2)-[FYNH]-[NQ]-x-E-x-[GSTA] (SEQ ID NO: 18), [LIVMFSTC]-[LIVFYS]-[LIV]-[LIVMST]-E-N-G-[LIVMFAR]-[CSAGN] (SEQ ID NO: 19), and [LIVM](2)-[KR]-x-[EQKRD]-x(4)-G-[LIVMFTC]-[LIVT]-[LIVMF]-[ST]-D-x(2)-[SGADNIT] (SEQ ID NO: 20), where the recombinant polypeptide has β-glucosidase activity; and b) culturing the host cell in a medium containing cellodextrin or a source of cellodextrin, whereby cellodextrin is transported into the cell and degraded by the recombinant polypeptide and whereby the host cell produces hydrocarbons or hydrocarbon derivatives from the cellodextrin. In certain embodiments that may be combined with any of the preceding embodiments, the recombinant polypeptide contains two or more sequences selected from F-x-[FYWM]-[GSTA]-x-[GSTA]-x-[GSTA](2)-[FYNH]-[NQ]-x-E-x-[GSTA] (SEQ ID NO: 16), [LIVMFSTC]-[LIVFYS]-[LIV]-[LIVMST]-E-N-G-[LIVMFAR]-[CSAGN] (SEQ ID NO: 17), and [LIVM](2)-[KR]-x-[EQKRD]-x(4)-G-[LIVMFTC]-[LIVT]-[LIVMF]-[ST]-D-x(2)-[SGADNIT] (SEQ ID NO: 18). In certain embodiments that may be combined with any of the preceding embodiments, the recombinant polypeptide contains an amino acid sequence that is least 29%, at least 30%, at least 35%, at least 40%, at least 45%, at least 50%, at least 55%, at least 60%, at least 65%, at least 70%, at least 75%, at least 80%, at least 85%, at least 90%, at least 95%, at least 99%, or at least 100% amino acid identical to the amino acid sequence of NCU00130. In certain embodiments that may be combined with any of the preceding embodiments, the host cell further contains a recombinant phosphoglucomutase. In certain embodiments, the recombinant phosphoglucomutase contains a conserved motif having the amino acid sequence of [GSA]-[LIVMF]-x-[LIVM]-[ST]-[PGA]-S-H-[NIC]-P (SEQ ID NO: 19). In certain embodiments that may be combined with any of the preceding embodiments, the host cell further contains a recombinant hexokinase. In certain embodiments, the recombinant hexokinase contains a conserved motif having the amino acid sequence of [LIVM]-G-F-[TN]-F-S-[FY]-P-x(5)-[LIVM]-[DNST]-x(3)-[LIVM]-x(2)-W-T-K-x-[LF] (SEQ ID NO: 20). In certain embodiments, the recombinant hexokinase is HXK1. In certain embodiments that may be combined with any of the preceding embodiments, the host cell further contains a second recombinant polypeptide containing Y-x(2)-G-x-[KR]-E-N-[AG]-[AG]-[IV]-F-x(2)-[ANST]-[NST]-x(2)-[AIV]-x(2)-[AGT]-x(4)-[AG]-x(4)-[ADNS] (SEQ ID NO: 233), Y-Q-[CN]-M-[IV]-T-F-[CN]-[FILMV]-[AS]-R-[ST]-[AS]-S-[FY]-[FY]-E-[STV]-G-x-[GS]-R-G-[IM]-G-F-R-D-S-[ACNS]-Q-D-[ILV]-[ILMV]-G-x-V-H-x-[IV]-P-[ADEST]-x-[AV]-[KR]-[AEQ]-x-[IL]-[FIL]-D (SEQ ID NO: 14), or G-x(2)-[FY]-x-N-[AGS]-x-[AS]-W-[APS]-V-[IL]-[AS]-x(2)-A-x(2)-[DE]-x-[AI]-x(3)-[LMV]-[DEN]-[ASV]-[ILV]-x(3)-L-x-T-x(2)-G-[ILV]-x(2)-[SV]-x-P-[AG] (SEQ ID NO: 15), where the second recombinant polypeptide has cellodextrin phosphorylase activity. In certain embodiments, the second recombinant polypeptide contains an amino acid sequence that has at least 29%, at least 30%, at least 35%, at least 40%, at least 45%, at least 50%, at least 55%, at least 60%, at least 65%, at least 70%, at least 75%, at least 80%, at least 85%, at least 90%, at least 95%, at least 99%, or at least 100% amino acid identity to the amino acid sequence of CDP_Clent, CDP_Ctherm, or CDP_Acell. In certain embodiments, the second recombinant polypeptide has cellobiose phosphorylase activity. In certain embodiments, the second recombinant polypeptide contains an amino acid sequence that has at least 29%, at least 30%, at least 35%, at least 40%, at least 45%, at least 50%, at least 55%, at least 60%, at least 65%, at least 70%, at least 75%, at least 80%, at least 85%, at least 90%, at least 95%, at least 99%, or at least 100% amino acid identity to an amino acid sequence selected from SEQ ID NO: 11 (CgCBP), SEQ ID NO: 12 (SdCBP), and SEQ ID NO: 13 (CtCBP). In certain embodiments that may be combined with any of the preceding embodiments, the second recombinant polypeptide contains one or more mutations. In certain embodiments, the one or more mutations are amino acid substitutions. In certain embodiments that may be combined with any of the preceding embodiments, the second recombinant polypeptide contains an amino acid substitution at one or more positions corresponding to positions of the amino acid sequence of SEQ ID NO: 12 (SdCBP), where the one or more amino acid substitutions are selected from an isoleucine (I) to glutamine (Q) substitution at a position corresponding to amino acid 409 of SEQ ID NO: 12; an isoleucine (I) to methionine (M) substitution at a position corresponding to amino acid 409 of SEQ ID NO: 12; an asparagine (N) to aspartate (D) substitution at a position corresponding to amino acid 482 of SEQ ID NO: 12; an asparagine (N) to threonine (T) substitution at a position corresponding to amino acid 482 of SEQ ID NO: 12; a cysteine (C) to serine (S) substitution at a position corresponding to amino acid 484 of SEQ ID NO: 12; a cysteine (C) to alanine (A) substitution at a position corresponding to amino acid 484 of SEQ ID NO: 12; a phenylalanie (F) to tryptophan (W) substitution at a position corresponding to amino acid 651 of SEQ ID NO: 12; a histidine (H) to asparagine (N) substitution at a position corresponding to amino acid 653 of SEQ ID NO: 12; a histidine (H) to alanine (A) substitution at a position corresponding to amino acid 653 of SEQ ID NO: 12; and combinations thereof.

[0016] In certain embodiments that may be combined with any of the preceding embodiments, the recombinant cellodextrin transporter contains a polypeptide selected from a polypeptide containing transmembrane α-helix 1, α-helix 2, α-helix 3, α-helix 4, α-helix 5, α-helix 6, α-helix 7, α-helix 8, α-helix 9, α-helix 10, α-helix 11, α-helix 12, and transmembrane α-helix 1 contains SEQ ID NO: 1; a polypeptide containing transmembrane α-helix 1, α-helix 2, α-helix 3, α-helix 4, α-helix 5, α-helix 6, α-helix 7, α-helix 8, α-helix 9, α-helix 10, α-helix 11, α-helix 12, and transmembrane α-helix 2 contains SEQ ID NO: 2; a polypeptide containing transmembrane α-helix 1, α-helix 2, α-helix 3, α-helix 4, α-helix 5, α-helix 6, α-helix 7, α-helix 8, α-helix 9, α-helix 10, α-helix 11, α-helix 12, and a loop connecting transmembrane α-helix 2 and transmembrane α-helix 3 contains SEQ ID NO: 3; a polypeptide containing transmembrane α-helix 1, α-helix 2, α-helix 3, α-helix 4, α-helix 5, α-helix 6, α-helix 7, α-helix 8, α-helix 9, α-helix 10, α-helix 11, α-helix 12, and transmembrane α-helix 5 contains SEQ ID NO: 4; a polypeptide containing transmembrane α-helix 1, α-helix 2, α-helix 3, α-helix 4, α-helix 5, α-helix 6, α-helix 7, α-helix 8, α-helix 9, α-helix 10, α-helix 11, α-helix 12, and transmembrane α-helix 6 contains SEQ ID NO: 5; a polypeptide containing transmembrane α-helix 1, α-helix 2, α-helix 3, α-helix 4, α-helix 5, α-helix 6, α-helix 7, α-helix 8, α-helix 9, α-helix 10, α-helix 11, α-helix 12, and sequence between transmembrane α-helix 6 and transmembrane α-helix 7 contains SEQ ID NO: 6; a polypeptide containing transmembrane α-helix 1, α-helix 2, α-helix 3, α-helix 4, α-helix 5, α-helix 6, α-helix 7, α-helix 8, α-helix 9, α-helix 10, α-helix 11, α-helix 12, and transmembrane α-helix 7 contains SEQ ID NO: 7; and a polypeptide containing transmembrane α-helix 1, α-helix 2, α-helix 3, α-helix 4, α-helix 5, α-helix 6, α-helix 7, α-helix 8, α-helix 9, α-helix 10, α-helix 11, α-helix 12, and transmembrane α-helix 10 and transmembrane α-helix 11 and the sequence between them contain SEQ ID NO: 8. In certain embodiments, the recombinant cellodextrin transporter is a cellobiose transporter. In certain embodiments, the cellobiose transporter has at least 29%, at least 30%, at least 35%, at least 40%, at least 45%, at least 50%, at least 55%, at least 60%, at least 65%, at least 70%, at least 75%, at least 80%, at least 85%, at least 90%, at least 95%, at least 99%, or at least 100% amino acid identity to SEQ ID NO: 9 (CDT-1) or SEQ ID NO: 10 (CDT-2). In certain embodiments that may be combined with any of the preceding embodiments, the recombinant cellodextrin transporter contains one or more mutations. In certain embodiments, the one or more mutations are amino acid substitutions. In certain embodiments that may be combined with any of the preceding embodiments, the recombinant cellodextrin transporter contains an amino acid substitution at one or more positions corresponding to positions of the amino acid sequence of SEQ ID NO: 9 (CDT-1), where the one or more positions are at positions selected from a position corresponding to amino acid 91 of SEQ ID NO: 9, a position corresponding to amino acid 104 of SEQ ID NO: 9, a position corresponding to amino acid 170 of SEQ ID NO: 9, a position corresponding to amino acid 174 of SEQ ID NO: 9, a position corresponding to amino acid 194 of SEQ ID NO: 9, a position corresponding to amino acid 213 of SEQ ID NO: 9, a position corresponding to amino acid 335 of SEQ ID NO: 9, and combinations thereof. In certain embodiments that may be combined with any of the preceding embodiments, the recombinant cellodextrin transporter contains an amino acid substitution at one or more positions corresponding to positions of the amino acid sequence of SEQ ID NO: 9 (CDT-1), where the one or more amino acid substitutions are at selected from a glycine (G) to alanine (A) substitution at a position corresponding to amino acid 91 of SEQ ID NO: 9, a glutamine (Q) to alanine (A) substitution at a position corresponding to amino acid 104 of SEQ ID NO: 9, a phenylalanie (F) to alanine (A) substitution at a position corresponding to amino acid 170 of SEQ ID NO: 9, an arginine (R) to alanine (A) substitution at a position corresponding to amino acid 174 of SEQ ID NO: 9, a glutamate (E) to alanine (A) substitution at a position corresponding to amino acid 194 of SEQ ID NO: 9, a phenylalanie (F) to lysine (L) substitution at a position corresponding to amino acid 213 of SEQ ID NO: 9, a phenylalanie (F) to alanine (A) substitution at a position corresponding to amino acid 335 of SEQ ID NO: 9, and combinations thereof.

[0017] Some aspects of the present disclosure relate to a method for degrading cellodextrin, by: a) providing a host cell containing a recombinant phosphoglucomutase, and a recombinant polypeptide containing Y-x(2)-G-x-[KR]-E-N-[AG]-[AG]-[IV]-F-x(2)-[ANST]-[NST]-x(2)-[AIV]-x(2)-[AGT]-x(4)-[AG]-x(4)-[ADNS] (SEQ ID NO: 233), Y-Q-[CN]-M-[IV]-T-F-[CN]-[FILMV]-[AS]-R-[ST]-[AS]-S-[FY]-[FY]-E-[STV]-G-x-[GS]-R-G-[IM]-G-F-R-D-S-[ACNS]-Q-D-[ILV]-[ILMV]-G-x-V-H-x-[IV]-P-[ADEST]-x-[AV]-[KR]-[AEQ]-x-[IL]-[FIL]-D (SEQ ID NO: 14), or G-x(2)-[FY]-x-N-[AGS]-x-[AS]-W-[APS]-V-[IL]-[AS]-x(2)-A-x(2)-[DE]-x-[AI]-x(3)-[LMV]-[DEN]-[ASV]-[ILV]-x(3)-L-x-T-x(2)-G-[ILV]-x(2)-[SV]-x-P-[AG] (SEQ ID NO: 15), where the recombinant polypeptide has cellodextrin phosphorylase activity; and b) culturing the host cell in a medium containing cellodextrin or a source of cellodextrin, whereby cellodextrin is degraded by the recombinant polypeptide. Other aspects of the present disclosure relate to a method for producing hydrocarbons or hydrocarbon derivatives from cellodextrin, by: a) providing a host cell containing a recombinant phosphoglucomutase, and a recombinant polypeptide containing Y-x(2)-G-x-[KR]-E-N-[AG]-[AG]-[IV]-F-x(2)-[ANST]-[NST]-x(2)-[AIV]-x(2)-[AGT]-x(4)-[AG]-x(4)-[ADNS] (SEQ ID NO: 233), Y-Q-[CN]-M-[IV]-T-F-[CN]-[FILMV]-[AS]-R-[ST]-[AS]-S-[FY]-[FY]-E-[STV]-G-x-[GS]-R-G-[IM]-G-F-R-D-S-[ACNS]-Q-D-[ILV]-[ILMV]-G-x-V-H-x-[IV]-P-[ADEST]-x-[AV]-[KR]-[AEQ]-x-[IL]-[FIL]-D (SEQ ID NO: 14), or G-x(2)-[FY]-x-N-[AGS]-x-[AS]-W-[APS]-V-[IL]-[AS]-x(2)-A-x(2)-[DE]-x-[AI]-x(3)-[LMV]-[DEN]-[ASV]-[ILV]-x(3)-L-x-T-x(2)-G-[ILV]-x(2)-[SV]-x-P-[AG] (SEQ ID NO: 15), where the recombinant polypeptide has cellodextrin phosphorylase activity; and b) culturing the host cell in a medium containing cellodextrin or a source of cellodextrin, whereby cellodextrin is degraded by the recombinant polypeptide and whereby the host cell produces hydrocarbons or hydrocarbon derivatives from the cellodextrin. Other aspects of the present disclosure relate to a method for reducing ATP consumption during glucose utilization, by: a) providing a host cell containing a recombinant phosphoglucomutase, and a recombinant polypeptide containing Y-x(2)-G-x-[KR]-E-N-[AG]-[AG]-[IV]-F-x(2)-[ANST]-[NST]-x(2)-[AIV]-x(2)-[AGT]-x(4)-[AG]-x(4)-[ADNS] (SEQ ID NO: 233), Y-Q-[CN]-M-[IV]-T-F-[CN]-[FILMV]-[AS]-R-[ST]-[AS]-S-[FY]-[FY]-E-[STV]-G-x-[GS]-R-G-[IM]-G-F-R-D-S-[ACNS]-Q-D-[ILV]-[ILMV]-G-x-V-H-x-[IV]-P-[ADEST]-x-[AV]-[KR]-[AEQ]-x-[IL]-[FIL]-D (SEQ ID NO: 14), or G-x(2)-[FY]-x-N-[AGS]-x-[AS]-W-[APS]-V-[IL]-[AS]-x(2)-A-x(2)-[DE]-x-[AI]-x(3)-[LMV]-[DEN]-[ASV]-[ILV]-x(3)-L-x-T-x(2)-G-[ILV]-x(2)-[SV]-x-P-[AG] (SEQ ID NO: 15), where the recombinant polypeptide has cellodextrin phosphorylase activity; and b) culturing the host cell in a medium containing cellodextrin or a source of cellodextrin, whereby cellodextrin is degraded by the recombinant polypeptide to glucose-1-phosphate, where the production of glucose-1-phosphate from cellodextrin reduces ATP consumption as compared to a corresponding cell lacking the recombinant polypeptide. In certain embodiments that may be combined with any of the preceding embodiments, the recombinant phosphoglucomutase contains a conserved motif having the amino acid sequence of [GSA]-[LIVMF]-x-[LIVM]-[ST]-[PGA]-S-H-[NIC]-P (SEQ ID NO: 19). In certain embodiments that may be combined with any of the preceding embodiments, the host cell further contains a recombinant hexokinase. In certain embodiments, the recombinant hexokinase contains a conserved motif having the amino acid sequence of [LIVM]-G-F-[TN]-F-S-[FY]-P-x(5)-[LIVM]-[DNST]-x(3)-[LIVM]-x(2)-W-T-K-x-[LF] (SEQ ID NO: 20). In certain embodiments, the recombinant hexokinase is HXK1.

[0018] Some aspects of the present disclosure relate to a method for degrading cellodextrin, by: a) providing a host cell containing a recombinant hexokinase, and a recombinant polypeptide containing Y-x(2)-G-x-[KR]-E-N-[AG]-[AG]-[IV]-F-x(2)-[ANST]-[NST]-x(2)-[AIV]-x(2)-[AGT]-x(4)-[AG]-x(4)-[ADNS] (SEQ ID NO: 233), Y-Q-[CN]-M-[IV]-T-F-[CN]-[FILMV]-[AS]-R-[ST]-[AS]-S-[FY]-[FY]-E-[STV]-G-x-[GS]-R-G-[IM]-G-F-R-D-S-[ACNS]-Q-D-[ILV]-[ILMV]-G-x-V-H-x-[IV]-P-[ADEST]-x-[AV]-[KR]-[AEQ]-x-[IL]-[FIL]-D (SEQ ID NO: 14), or G-x(2)-[FY]-x-N-[AGS]-x-[AS]-W-[APS]-V-[IL]-[AS]-x(2)-A-x(2)-[DE]-x-[AI]-x(3)-[LMV]-[DEN]-[ASV]-[ILV]-x(3)-L-x-T-x(2)-G-[ILV]-x(2)-[SV]-x-P-[AG] (SEQ ID NO: 15), where the recombinant polypeptide has cellodextrin phosphorylase activity; and b) culturing the host cell in a medium containing cellodextrin or a source of cellodextrin, whereby cellodextrin is degraded by the recombinant polypeptide. Other aspects of the present disclosure relate to a method for producing hydrocarbons or hydrocarbon derivatives from cellodextrin, by: a) providing a host cell containing a recombinant hexokinase, and a recombinant polypeptide containing Y-x(2)-G-x-[KR]-E-N-[AG]-[AG]-[IV]-F-x(2)-[ANST]-[NST]-x(2)-[AIV]-x(2)-[AGT]-x(4)-[AG]-x(4)-[ADNS] (SEQ ID NO: 233), Y-Q-[CN]-M-[IV]-T-F-[CN]-[FILMV]-[AS]-R-[ST]-[AS]-S-[FY]-[FY]-E-[STV]-G-x-[GS]-R-G-[IM]-G-F-R-D-S-[ACNS]-Q-D-[ILV]-[ILMV]-G-x-V-H-x-[IV]-P-[ADEST]-x-[AV]-[KR]-[AEQ]-x-[IL]-[FIL]-D (SEQ ID NO: 14), or G-x(2)-[FY]-x-N-[AGS]-x-[AS]-W-[APS]-V-[IL]-[AS]-x(2)-A-x(2)-[DE]-x-[AI]-x(3)-[LMV]-[DEN]-[ASV]-[ILV]-x(3)-L-x-T-x(2)-G-[ILV]-x(2)-[SV]-x-P-[AG] (SEQ ID NO: 15), where the recombinant polypeptide has cellodextrin phosphorylase activity; and b) culturing the host cell in a medium containing cellodextrin or a source of cellodextrin, whereby cellodextrin is degraded by the recombinant polypeptide and whereby the host cell produces hydrocarbons or hydrocarbon derivatives from the cellodextrin. Other aspects of the present disclosure relate to a method for reducing ATP consumption during glucose utilization, by: a) providing a host cell containing a recombinant hexokinase, and a recombinant polypeptide containing Y-x(2)-G-x-[KR]-E-N-[AG]-[AG]-[IV]-F-x(2)-[ANST]-[NST]-x(2)-[AIV]-x(2)-[AGT]-x(4)-[AG]-x(4)-[ADNS] (SEQ ID NO: 233), Y-Q-[CN]-M-[IV]-T-F-[CN]-[FILMV]-[AS]-R-[ST]-[AS]-S-[FY]-[FY]-E-[STV]-G-x-[GS]-R-G-[IM]-G-F-R-D-S-[ACNS]-Q-D-[ILV]-[ILMV]-G-x-V-H-x-[IV]-P-[ADEST]-x-[AV]-[KR]-[AEQ]-x-[IL]-[FIL]-D (SEQ ID NO: 14), or G-x(2)-[FY]-x-N-[AGS]-x-[AS]-W-[APS]-V-[IL]-[AS]-x(2)-A-x(2)-[DE]-x-[AI]-x(3)-[LMV]-[DEN]-[ASV]-[ILV]-x(3)-L-x-T-x(2)-G-[ILV]-x(2)-[SV]-x-P-[AG] (SEQ ID NO: 15), where the recombinant polypeptide has cellodextrin phosphorylase activity; and b) culturing the host cell in a medium containing cellodextrin or a source of cellodextrin, whereby cellodextrin is degraded by the recombinant polypeptide to glucose-1-phosphate, where the production of glucose-1-phosphate from cellodextrin reduces ATP consumption as compared to a corresponding cell lacking the recombinant polypeptide. In certain embodiments that may be combined with any of the preceding embodiments, the recombinant hexokinase contains a conserved motif having the amino acid sequence of [LIVM]-G-F-[TN]-F-S-[FY]-P-x(5)-[LIVM]-[DNST]-x(3)-[LIVM]-x(2)-W-T-K-x-[LF] (SEQ ID NO: 20). In certain embodiments, the recombinant hexokinase is HXK1. In certain embodiments that may be combined with any of the preceding embodiments, the host cell further contains a recombinant phosphoglucomutase. In certain embodiments, the recombinant phosphoglucomutase contains a conserved motif having the amino acid sequence of [GSA]-[LIVMF]-x-[LIVM]-[ST]-[PGA]-S-H-[NIC]-P (SEQ ID NO: 19). In certain embodiments that may be combined with any of the preceding embodiments, the recombinant polypeptide contains an amino acid sequence that has at least 29%, at least 30%, at least 35%, at least 40%, at least 45%, at least 50%, at least 55%, at least 60%, at least 65%, at least 70%, at least 75%, at least 80%, at least 85%, at least 90%, at least 95%, at least 99%, or at least 100% amino acid identity to the amino acid sequence of CDP_Clent, CDP_Ctherm, or CDP_Acell. In certain embodiments that may be combined with any of the preceding embodiments, the recombinant polypeptide has cellobiose phosphorylase activity. In certain embodiments, the recombinant polypeptide contains an amino acid sequence that has at least 29%, at least 30%, at least 35%, at least 40%, at least 45%, at least 50%, at least 55%, at least 60%, at least 65%, at least 70%, at least 75%, at least 80%, at least 85%, at least 90%, at least 95%, at least 99%, or at least 100% amino acid identity to an amino acid sequence selected from SEQ ID NO: 11 (CgCBP), SEQ ID NO: 12 (SdCBP), and SEQ ID NO: 13 (CtCBP). In certain embodiments that may be combined with any of the preceding embodiments, the recombinant polypeptide contains one or more mutations. In certain embodiments, the one or more mutations are amino acid substitutions. In certain embodiments that may be combined with any of the preceding embodiments, the recombinant polypeptide contains an amino acid substitution at one or more positions corresponding to positions of the amino acid sequence of SEQ ID NO: 12 (SdCBP), where the one or more amino acid substitutions are selected from an isoleucine (I) to glutamine (Q) substitution at a position corresponding to amino acid 409 of SEQ ID NO: 12; an isoleucine (I) to methionine (M) substitution at a position corresponding to amino acid 409 of SEQ ID NO: 12; an asparagine (N) to aspartate (D) substitution at a position corresponding to amino acid 482 of SEQ ID NO: 12; an asparagine (N) to threonine (T) substitution at a position corresponding to amino acid 482 of SEQ ID NO: 12; a cysteine (C) to serine (S) substitution at a position corresponding to amino acid 484 of SEQ ID NO: 12; a cysteine (C) to alanine (A) substitution at a position corresponding to amino acid 484 of SEQ ID NO: 12; a phenylalanie (F) to tryptophan (W) substitution at a position corresponding to amino acid 651 of SEQ ID NO: 12; a histidine (H) to asparagine (N) substitution at a position corresponding to amino acid 653 of SEQ ID NO: 12; a histidine (H) to alanine (A) substitution at a position corresponding to amino acid 653 of SEQ ID NO: 12; and combinations thereof.

[0019] Some aspects of the present disclosure relate to a method for degrading cellodextrin, by: a) providing a host cell containing a recombinant phosphoglucomutase and a recombinant hexokinase; and b) culturing the host cell in a medium containing cellodextrin or a source of cellodextrin, whereby cellodextrin is degraded. Other aspects of the present disclosure relate to a method for producing hydrocarbons or hydrocarbon derivatives from cellodextrin, by: a) providing a host cell containing a recombinant phosphoglucomutase and a recombinant hexokinase; and b) culturing the host cell in a medium containing cellodextrin or a source of cellodextrin, whereby cellodextrin is degraded and whereby the host cell produces hydrocarbons or hydrocarbon derivatives from the cellodextrin. In certain embodiments that may be combined with any of the preceding embodiments, the recombinant phosphoglucomutase contains a conserved motif having the amino acid sequence of [GSA]-[LIVMF]-x-[LIVM]-[ST]-[PGA]-S-H-[NIC]-P (SEQ ID NO: 19). In certain embodiments that may be combined with any of the preceding embodiments, the recombinant hexokinase contains a conserved motif having the amino acid sequence of [LIVM]-G-F-[TN]-F-S-[FY]-P-x(5)-[LIVM]-[DNST]-x(3)-[LIVM]-x(2)-W-T-K-x-[LF] (SEQ ID NO: 20). In certain embodiments, the recombinant hexokinase is HXK1. In certain embodiments that may be combined with any of the preceding embodiments, the host cell further contains a recombinant polypeptide containing Y-x(2)-G-x-[KR]-E-N-[AG]-[AG]-[IV]-F-x(2)-[ANST]-[NST]-x(2)-[AIV]-x(2)-[AGT]-x(4)-[AG]-x(4)-[ADNS] (SEQ ID NO: 233), Y-Q-[CN]-M-[IV]-T-F-[CN]-[FILMV]-[AS]-R-[ST]-[AS]-S-[FY]-[FY]-E-[STV]-G-x-[GS]-R-G-[IM]-G-F-R-D-S-[ACNS]-Q-D-[ILV]-[ILMV]-G-x-V-H-x-[IV]-P-[ADEST]-x-[AV]-[KR]-[AEQ]-x-[IL]-[FIL]-D (SEQ ID NO: 14), or G-x(2)-[FY]-x-N-[AGS]-x-[AS]-W-[APS]-V-[IL]-[AS]-x(2)-A-x(2)-[DE]-x-[AI]-x(3)-[LMV]-[DEN]-[ASV]-[ILV]-x(3)-L-x-T-x(2)-G-[ILV]-x(2)-[SV]-x-P-[AG] (SEQ ID NO: 15), where the recombinant polypeptide has cellodextrin phosphorylase activity. In certain embodiments, the recombinant polypeptide contains an amino acid sequence that has at least 29%, at least 30%, at least 35%, at least 40%, at least 45%, at least 50%, at least 55%, at least 60%, at least 65%, at least 70%, at least 75%, at least 80%, at least 85%, at least 90%, at least 95%, at least 99%, or at least 100% amino acid identity to the amino acid sequence of CDP_Clent, CDP_Ctherm, or CDP_Acell. In certain embodiments, the recombinant polypeptide has cellobiose phosphorylase activity. In certain embodiments, the recombinant polypeptide contains an amino acid sequence that has at least 29%, at least 30%, at least 35%, at least 40%, at least 45%, at least 50%, at least 55%, at least 60%, at least 65%, at least 70%, at least 75%, at least 80%, at least 85%, at least 90%, at least 95%, at least 99%, or at least 100% amino acid identity to an amino acid sequence selected from SEQ ID NO: 11 (CgCBP), SEQ ID NO: 12 (SdCBP), and SEQ ID NO: 13 (CtCBP). In certain embodiments that may be combined with any of the preceding embodiments, the recombinant polypeptide contains one or more mutations. In certain embodiments, the one or more mutations are amino acid substitutions. In certain embodiments that may be combined with any of the preceding embodiments, the recombinant polypeptide contains an amino acid substitution at one or more positions corresponding to positions of the amino acid sequence of SEQ ID NO: 12 (SdCBP), where the one or more amino acid substitutions are selected from an isoleucine (I) to glutamine (Q) substitution at a position corresponding to amino acid 409 of SEQ ID NO: 12; an isoleucine (I) to methionine (M) substitution at a position corresponding to amino acid 409 of SEQ ID NO: 12; an asparagine (N) to aspartate (D) substitution at a position corresponding to amino acid 482 of SEQ ID NO: 12; an asparagine (N) to threonine (T) substitution at a position corresponding to amino acid 482 of SEQ ID NO: 12; a cysteine (C) to serine (S) substitution at a position corresponding to amino acid 484 of SEQ ID NO: 12; a cysteine (C) to alanine (A) substitution at a position corresponding to amino acid 484 of SEQ ID NO: 12; a phenylalanie (F) to tryptophan (W) substitution at a position corresponding to amino acid 651 of SEQ ID NO: 12; a histidine (H) to asparagine (N) substitution at a position corresponding to amino acid 653 of SEQ ID NO: 12; a histidine (H) to alanine (A) substitution at a position corresponding to amino acid 653 of SEQ ID NO: 12; and combinations thereof. In certain embodiments that may be combined with any of the preceding embodiments, the recombinant polypeptide reduces ATP consumption as compared to a corresponding cell lacking the recombinant polypeptide.

[0020] In certain embodiments that may be combined with any of the preceding embodiments, the host cell further contains a second recombinant polypeptide containing one or more sequences selected from F-x-[FYWM]-[GSTA]-x-[GSTA]-x-[GSTA](2)-[FYNH]-[NQ]-x-E-x-[GSTA] (SEQ ID NO: 18), [LIVMFSTC]-[LIVFYS]-[LIV]-[LIVMST]-E-N-G-[LIVMFAR]-[CSAGN] (SEQ ID NO: 19), and [LIVM](2)-[KR]-x-[EQKRD]-x(4)-G-[LIVMFTC]-[LIVT]-[LIVMF]-[ST]-D-x(2)-[SGADNIT] (SEQ ID NO: 20), where the second recombinant polypeptide has β-glucosidase activity. In certain embodiments, the second recombinant polypeptide contains two or more sequences selected from F-x-[FYWM]-[GSTA]-x-[GSTA]-x-[GSTA](2)-[FYNH]-[NQ]-x-E-x-[GSTA] (SEQ ID NO: 16), [LIVMFSTC]-[LIVFYS]-[LIV]-[LIVMST]-E-N-G-[LIVMFAR]-[CSAGN] (SEQ ID NO: 17), and [LIVM](2)-[KR]-x-[EQKRD]-x(4)-G-[LIVMFTC]-[LIVT]-[LIVMF]-[ST]-D-x(2)-[SGADNIT] (SEQ ID NO: 18). In certain embodiments that may be combined with any of the preceding embodiments, the second recombinant polypeptide contains an amino acid sequence that is least 29%, at least 30%, at least 35%, at least 40%, at least 45%, at least 50%, at least 55%, at least 60%, at least 65%, at least 70%, at least 75%, at least 80%, at least 85%, at least 90%, at least 95%, at least 99%, or at least 100% amino acid identical to the amino acid sequence of NCU00130.

[0021] Some aspects of the present disclosure relate to a method for degrading cellodextrin, by: a) providing a host cell containing: a first recombinant polypeptide containing Y-x(2)-G-x-[KR]-E-N-[AG]-[AG]-[IV]-F-x(2)-[ANST]-[NST]-x(2)-[AIV]-x(2)-[AGT]-x(4)-[AG]-x(4)-[ADNS] (SEQ ID NO: 233), Y-Q-[CN]-M-[IV]-T-F-[CN]-[FILMV]-[AS]-R-[ST]-[AS]-S-[FY]-[FY]-E-[STV]-G-x-[GS]-R-G-[IM]-G-F-R-D-S-[ACNS]-Q-D-[ILV]-[ILMV]-G-x-V-H-x-[IV]-P-[ADEST]-x-[AV]-[KR]-[AEQ]-x-[IL]-[FIL]-D (SEQ ID NO: 14), or G-x(2)-[FY]-x-N-[AGS]-x-[AS]-W-[APS]-V-[IL]-[AS]-x(2)-A-x(2)-[DE]-x-[AI]-x(3)-[LMV]-[DEN]-[ASV]-[ILV]-x(3)-L-x-T-x(2)-G-[ILV]-x(2)-[SV]-x-P-[AG] (SEQ ID NO: 15), where the first recombinant polypeptide has cellodextrin phosphorylase activity, and a second recombinant polypeptide containing one or more sequences selected from F-x-[FYWM]-[GSTA]-x-[GSTA]-x-[GSTA](2)-[FYNH]-[NQ]-x-E-x-[GSTA] (SEQ ID NO: 18), [LIVMFSTC]-[LIVFYS]-[LIV]-[LIVMST]-E-N-G-[LIVMFAR]-[CSAGN] (SEQ ID NO: 19), and [LIVM](2)-[KR]-x-[EQKRD]-x(4)-G-[LIVMFTC]-[LIVT]-[LIVMF]-[ST]-D-x(2)-[SGADNIT] (SEQ ID NO: 20), where the second recombinant polypeptide has β-glucosidase activity; and b) culturing the host cell in a medium containing cellodextrin or a source of cellodextrin, whereby cellodextrin is degraded by the recombinant polypeptides. Other aspects of the present disclosure relate to a method for producing hydrocarbons or hydrocarbon derivatives from cellodextrin, by: a) providing a host cell containing: a first recombinant polypeptide containing Y-x(2)-G-x-[KR]-E-N-[AG]-[AG]-[IV]-F-x(2)-[ANST]-[NST]-x(2)-[AIV]-x(2)-[AGT]-x(4)-[AG]-x(4)-[ADNS](SEQ ID NO: 233), Y-Q-[CN]-M-[IV]-T-F-[CN]-[FILMV]-[AS]-R-[ST]-[AS]-S-[FY]-[FY]-E-[STV]-G-x-[GS]-R-G-[IM]-G-F-R-D-S-[ACNS]-Q-D-[ILV]-[ILMV]-G-x-V-H-x-[IV]-P-[ADEST]-x-[AV]-[KR]-[AEQ]-x-[IL]-[FIL]-D (SEQ ID NO: 14), or G-x(2)-[FY]-x-N-[AGS]-x-[AS]-W-[APS]-V-[IL]-[AS]-x(2)-A-x(2)-[DE]-x-[AI]-x(3)-[LMV]-[DEN]-[ASV]-[ILV]-x(3)-L-x-T-x(2)-G-[ILV]-x(2)-[SV]-x-P-[AG] (SEQ ID NO: 15), where the first recombinant polypeptide has cellodextrin phosphorylase activity, and a second recombinant polypeptide containing one or more sequences selected from F-x-[FYWM]-[GSTA]-x-[GSTA]-x-[GSTA](2)-[FYNH]-[NQ]-x-E-x-[GSTA] (SEQ ID NO: 18), [LIVMFSTC]-[LIVFYS]-[LIV]-[LIVMST]-E-N-G-[LIVMFAR]-[CSAGN] (SEQ ID NO: 19), and [LIVM](2)-[KR]-x-[EQKRD]-x(4)-G-[LIVMFTC]-[LIVT]-[LIVMF]-[ST]-D-x(2)-[SGADNIT] (SEQ ID NO: 20), where the second recombinant polypeptide has β-glucosidase activity; and b) culturing the host cell in a medium containing cellodextrin or a source of cellodextrin, whereby cellodextrin is degraded by the recombinant polypeptides and whereby the host cell produces hydrocarbons or hydrocarbon derivatives from the cellodextrin. In certain embodiments that may be combined with any of the preceding embodiments, the first recombinant polypeptide contains an amino acid sequence that has at least 29%, at least 30%, at least 35%, at least 40%, at least 45%, at least 50%, at least 55%, at least 60%, at least 65%, at least 70%, at least 75%, at least 80%, at least 85%, at least 90%, at least 95%, at least 99%, or at least 100% amino acid identity to the amino acid sequence of CDP_Clent, CDP_Ctherm, or CDP_Acell. In certain embodiments that may be combined with any of the preceding embodiments, the first recombinant polypeptide has cellobiose phosphorylase activity. In certain embodiments, the first recombinant polypeptide contains an amino acid sequence that has at least 29%, at least 30%, at least 35%, at least 40%, at least 45%, at least 50%, at least 55%, at least 60%, at least 65%, at least 70%, at least 75%, at least 80%, at least 85%, at least 90%, at least 95%, at least 99%, or at least 100% amino acid identity to an amino acid sequence selected from SEQ ID NO: 11 (CgCBP), SEQ ID NO: 12 (SdCBP), and SEQ ID NO: 13 (CtCBP). In certain embodiments that may be combined with any of the preceding embodiments, the first recombinant polypeptide contains one or more mutations. In certain embodiments, the one or more mutations are amino acid substitutions. In certain embodiments that may be combined with any of the preceding embodiments, the first recombinant polypeptide contains an amino acid substitution at one or more positions corresponding to positions of the amino acid sequence of SEQ ID NO: 12 (SdCBP), where the one or more amino acid substitutions are selected from an isoleucine (I) to glutamine (Q) substitution at a position corresponding to amino acid 409 of SEQ ID NO: 12; an isoleucine (I) to methionine (M) substitution at a position corresponding to amino acid 409 of SEQ ID NO: 12; an asparagine (N) to aspartate (D) substitution at a position corresponding to amino acid 482 of SEQ ID NO: 12; an asparagine (N) to threonine (T) substitution at a position corresponding to amino acid 482 of SEQ ID NO: 12; a cysteine (C) to serine (S) substitution at a position corresponding to amino acid 484 of SEQ ID NO: 12; a cysteine (C) to alanine (A) substitution at a position corresponding to amino acid 484 of SEQ ID NO: 12; a phenylalanie (F) to tryptophan (W) substitution at a position corresponding to amino acid 651 of SEQ ID NO: 12; a histidine (H) to asparagine (N) substitution at a position corresponding to amino acid 653 of SEQ ID NO: 12; a histidine (H) to alanine (A) substitution at a position corresponding to amino acid 653 of SEQ ID NO: 12; and combinations thereof. In certain embodiments that may be combined with any of the preceding embodiments, the host cell further contains a recombinant phosphoglucomutase. In certain embodiments, the recombinant phosphoglucomutase contains a conserved motif having the amino acid sequence of [GSA]-[LIVMF]-x-[LIVM]-[ST]-[PGA]-S-H-[NIC]-P (SEQ ID NO: 19). In certain embodiments that may be combined with any of the preceding embodiments, the host cell further contains a recombinant hexokinase. In certain embodiments, the recombinant hexokinase contains a conserved motif having the amino acid sequence of [LIVM]-G-F-[TN]-F-S-[FY]-P-x(5)-[LIVM]-[DNST]-x(3)-[LIVM]-x(2)-W-T-K-x-[LF] (SEQ ID NO: 20). In certain embodiments, the recombinant hexokinase is HXK1.

[0022] Some aspects of the present disclosure relate to a method for degrading cellodextrin, by: a) providing a host cell containing a recombinant phosphoglucomutase, and a recombinant polypeptide containing one or more sequences selected from F-x-[FYWM]-[GSTA]-x-[GSTA]-x-[GSTA](2)-[FYNH]-[NQ]-x-E-x-[GSTA] (SEQ ID NO: 18), [LIVMFSTC]-[LIVFYS]-[LIV]-[LIVMST]-E-N-G-[LIVMFAR]-[CSAGN] (SEQ ID NO: 19), and [LIVM](2)-[KR]-x-[EQKRD]-x(4)-G-[LIVMFTC]-[LIVT]-[LIVMF]-[ST]-D-x(2)-[SGADNIT] (SEQ ID NO: 20), where the recombinant polypeptide has β-glucosidase activity; and b) culturing the host cell in a medium containing cellodextrin or a source of cellodextrin, whereby cellodextrin is degraded by the recombinant polypeptide. Other aspects of the present disclosure relate to a method for producing hydrocarbons or hydrocarbon derivatives from cellodextrin, by: a) providing a host cell containing a recombinant phosphoglucomutase, and a recombinant polypeptide containing one or more sequences selected from F-x-[FYWM]-[GSTA]-x-[GSTA]-x-[GSTA](2)-[FYNH]-[NQ]-x-E-x-[GSTA] (SEQ ID NO: 18), [LIVMFSTC]-[LIVFYS]-[LIV]-[LIVMST]-E-N-G-[LIVMFAR]-[CSAGN] (SEQ ID NO: 19), and [LIVM](2)-[KR]-x-[EQKRD]-x(4)-G-[LIVMFTC]-[LIVT]-[LIVMF]-[ST]-D-x(2)-[SGADNIT] (SEQ ID NO: 20), where the recombinant polypeptide has β-glucosidase activity; and b) culturing the host cell in a medium containing cellodextrin or a source of cellodextrin, whereby cellodextrin is degraded by the recombinant polypeptide and whereby the host cell produces hydrocarbons or hydrocarbon derivatives from the cellodextrin. In certain embodiments that may be combined with any of the preceding embodiments, the recombinant phosphoglucomutase contains a conserved motif having the amino acid sequence of [GSA]-[LIVMF]-x-[LIVM]-[ST]-[PGA]-S-H-[NIC]-P (SEQ ID NO: 19). In certain embodiments that may be combined with any of the preceding embodiments, the host cell further contains a recombinant hexokinase. In certain embodiments, the recombinant hexokinase contains a conserved motif having the amino acid sequence of [LIVM]-G-F-[TN]-F-S-[FY]-P-x(5)-[LIVM]-[DNST]-x(3)-[LIVM]-x(2)-W-T-K-x-[LF] (SEQ ID NO: 20). In certain embodiments, the recombinant hexokinase is HXK1.

[0023] Some aspects of the present disclosure relate to a method for degrading cellodextrin, by: a) providing a host cell containing a recombinant hexokinase, and a recombinant polypeptide containing one or more sequences selected from F-x-[FYWM]-[GSTA]-x-[GSTA]-x-[GSTA](2)-[FYNH]-[NQ]-x-E-x-[GSTA] (SEQ ID NO: 18), [LIVMFSTC]-[LIVFYS]-[LIV]-[LIVMST]-E-N-G-[LIVMFAR]-[CSAGN] (SEQ ID NO: 19), and [LIVM](2)-[KR]-x-[EQKRD]-x(4)-G-[LIVMFTC]-[LIVT]-[LIVMF]-[ST]-D-x(2)-[SGADNIT] (SEQ ID NO: 20), where the recombinant polypeptide has β-glucosidase activity; and b) culturing the host cell in a medium containing cellodextrin or a source of cellodextrin, whereby cellodextrin is degraded by the recombinant polypeptide. Other aspects of the present disclosure relate to a method for producing hydrocarbons or hydrocarbon derivatives from cellodextrin, by: a) providing a host cell containing a recombinant hexokinase, and a recombinant polypeptide containing one or more sequences selected from F-x-[FYWM]-[GSTA]-x-[GSTA]-x-[GSTA](2)-[FYNH]-[NQ]-x-E-x-[GSTA] (SEQ ID NO: 18), [LIVMFSTC]-[LIVFYS]-[LIV]-[LIVMST]-E-N-G-[LIVMFAR]-[CSAGN] (SEQ ID NO: 19), and [LIVM](2)-[KR]-x-[EQKRD]-x(4)-G-[LIVMFTC]-[LIVT]-[LIVMF]-[ST]-D-x(2)-[SGADNIT] (SEQ ID NO: 20), where the recombinant polypeptide has β-glucosidase activity; and b) culturing the host cell in a medium containing cellodextrin or a source of cellodextrin, whereby cellodextrin is degraded by the recombinant polypeptide and whereby the host cell produces hydrocarbons or hydrocarbon derivatives from the cellodextrin. In certain embodiments that may be combined with any of the preceding embodiments, the recombinant hexokinase contains a conserved motif having the amino acid sequence of [LIVM]-G-F-[TN]-F-S-[FY]-P-x(5)-[LIVM]-[DNST]-x(3)-[LIVM]-x(2)-W-T-K-x-[LF] (SEQ ID NO: 20). In certain embodiments, the recombinant hexokinase is HXK1. In certain embodiments that may be combined with any of the preceding embodiments, the host cell further contains a recombinant phosphoglucomutase. In certain embodiments the recombinant phosphoglucomutase contains a conserved motif having the amino acid sequence of [GSA]-[LIVMF]-x-[LIVM]-[ST]-[PGA]-S-H-[NIC]-P (SEQ ID NO: 19).

[0024] In certain embodiments that may be combined with any of the preceding embodiments, the host cell further contains a second recombinant polypeptide containing Y-x(2)-G-x-[KR]-E-N-[AG]-[AG]-[IV]-F-x(2)-[ANST]-[NST]-x(2)-[AIV]-x(2)-[AGT]-x(4)-[AG]-x(4)-[ADNS] (SEQ ID NO: 233), Y-Q-[CN]-M-[IV]-T-F-[CN]-[FILMV]-[AS]-R-[ST]-[AS]-S-[FY]-[FY]-E-[STV]-G-x-[GS]-R-G-[IM]-G-F-R-D-S-[ACNS]-Q-D-[ILV]-[ILMV]-G-x-V-H-x-[IV]-P-[ADEST]-x-[AV]-[KR]-[AEQ]-x-[IL]-[FIL]-D (SEQ ID NO: 14), or G-x(2)-[FY]-x-N-[AGS]-x-[AS]-W-[APS]-V-[IL]-[AS]-x(2)-A-x(2)-[DE]-x-[AI]-x(3)-[LMV]-[DEN]-[ASV]-[ILV]-x(3)-L-x-T-x(2)-G-[ILV]-x(2)-[SV]-x-P-[AG] (SEQ ID NO: 15), where the second recombinant polypeptide has cellodextrin phosphorylase activity. In certain embodiments, the second recombinant polypeptide contains an amino acid sequence that has at least 29%, at least 30%, at least 35%, at least 40%, at least 45%, at least 50%, at least 55%, at least 60%, at least 65%, at least 70%, at least 75%, at least 80%, at least 85%, at least 90%, at least 95%, at least 99%, or at least 100% amino acid identity to the amino acid sequence of CDP_Clent, CDP_Ctherm, or CDP_Acell. In certain embodiments, the second recombinant polypeptide has cellobiose phosphorylase activity. In certain embodiments, the second recombinant polypeptide contains an amino acid sequence that has at least 29%, at least 30%, at least 35%, at least 40%, at least 45%, at least 50%, at least 55%, at least 60%, at least 65%, at least 70%, at least 75%, at least 80%, at least 85%, at least 90%, at least 95%, at least 99%, or at least 100% amino acid identity to an amino acid sequence selected from SEQ ID NO: 11 (CgCBP), SEQ ID NO: 12 (SdCBP), and SEQ ID NO: 13 (CtCBP). In certain embodiments that may be combined with any of the preceding embodiments, the second recombinant polypeptide contains one or more mutations. In certain embodiments, the one or more mutations are amino acid substitutions. In certain embodiments that may be combined with any of the preceding embodiments, the second recombinant polypeptide contains an amino acid substitution at one or more positions corresponding to positions of the amino acid sequence of SEQ ID NO: 12 (SdCBP), where the one or more amino acid substitutions are selected from an isoleucine (I) to glutamine (Q) substitution at a position corresponding to amino acid 409 of SEQ ID NO: 12; an isoleucine (I) to methionine (M) substitution at a position corresponding to amino acid 409 of SEQ ID NO: 12; an asparagine (N) to aspartate (D) substitution at a position corresponding to amino acid 482 of SEQ ID NO: 12; an asparagine (N) to threonine (T) substitution at a position corresponding to amino acid 482 of SEQ ID NO: 12; a cysteine (C) to serine (S) substitution at a position corresponding to amino acid 484 of SEQ ID NO: 12; a cysteine (C) to alanine (A) substitution at a position corresponding to amino acid 484 of SEQ ID NO: 12; a phenylalanie (F) to tryptophan (W) substitution at a position corresponding to amino acid 651 of SEQ ID NO: 12; a histidine (H) to asparagine (N) substitution at a position corresponding to amino acid 653 of SEQ ID NO: 12; a histidine (H) to alanine (A) substitution at a position corresponding to amino acid 653 of SEQ ID NO: 12; and combinations thereof.

[0025] In certain embodiments that may be combined with any of the preceding embodiments, the host cell further contains a recombinant cellodextrin transporter containing a polypeptide selected from a polypeptide containing transmembrane α-helix 1, α-helix 2, α-helix 3, α-helix 4, α-helix 5, α-helix 6, α-helix 7, α-helix 8, α-helix 9, α-helix 10, α-helix 11, α-helix 12, and transmembrane α-helix 1 contains SEQ ID NO: 1; a polypeptide containing transmembrane α-helix 1, α-helix 2, α-helix 3, α-helix 4, α-helix 5, α-helix 6, α-helix 7, α-helix 8, α-helix 9, α-helix 10, α-helix 11, α-helix 12, and transmembrane α-helix 2 contains SEQ ID NO: 2; a polypeptide containing transmembrane α-helix 1, α-helix 2, α-helix 3, α-helix 4, α-helix 5, α-helix 6, α-helix 7, α-helix 8, α-helix 9, α-helix 10, α-helix 11, α-helix 12, and a loop connecting transmembrane α-helix 2 and transmembrane α-helix 3 contains SEQ ID NO: 3; a polypeptide containing transmembrane α-helix 1, α-helix 2, α-helix 3, α-helix 4, α-helix 5, α-helix 6, α-helix 7, α-helix 8, α-helix 9, α-helix 10, α-helix 11, α-helix 12, and transmembrane α-helix 5 contains SEQ ID NO: 4; a polypeptide containing transmembrane α-helix 1, α-helix 2, α-helix 3, α-helix 4, α-helix 5, α-helix 6, α-helix 7, α-helix 8, α-helix 9, α-helix 10, α-helix 11, α-helix 12, and transmembrane α-helix 6 contains SEQ ID NO: 5; a polypeptide containing transmembrane α-helix 1, α-helix 2, α-helix 3, α-helix 4, α-helix 5, α-helix 6, α-helix 7, α-helix 8, α-helix 9, α-helix 10, α-helix 11, α-helix 12, and sequence between transmembrane α-helix 6 and transmembrane α-helix 7 contains SEQ ID NO: 6; a polypeptide containing transmembrane α-helix 1, α-helix 2, α-helix 3, α-helix 4, α-helix 5, α-helix 6, α-helix 7, α-helix 8, α-helix 9, α-helix 10, α-helix 11, α-helix 12, and transmembrane α-helix 7 contains SEQ ID NO: 7; and a polypeptide containing transmembrane α-helix 1, α-helix 2, α-helix 3, α-helix 4, α-helix 5, α-helix 6, α-helix 7, α-helix 8, α-helix 9, α-helix 10, α-helix 11, α-helix 12, and transmembrane α-helix 10 and transmembrane α-helix 11 and the sequence between them contain SEQ ID NO: 8. In certain embodiments, the recombinant cellodextrin transporter is a cellobiose transporter. In certain embodiments, the cellobiose transporter has at least 29%, at least 30%, at least 35%, at least 40%, at least 45%, at least 50%, at least 55%, at least 60%, at least 65%, at least 70%, at least 75%, at least 80%, at least 85%, at least 90%, at least 95%, at least 99%, or at least 100% amino acid identity to SEQ ID NO: 9 (CDT-1) or SEQ ID NO: 10 (CDT-2). In certain embodiments that may be combined with any of the preceding embodiments, the recombinant cellodextrin transporter contains one or more mutations. In certain embodiments, the one or more mutations are amino acid substitutions. In certain embodiments that may be combined with any of the preceding embodiments, the recombinant cellodextrin transporter contains an amino acid substitution at one or more positions corresponding to positions of the amino acid sequence of SEQ ID NO: 9 (CDT-1), where the one or more positions are at positions selected from a position corresponding to amino acid 91 of SEQ ID NO: 9, a position corresponding to amino acid 104 of SEQ ID NO: 9, a position corresponding to amino acid 170 of SEQ ID NO: 9, a position corresponding to amino acid 174 of SEQ ID NO: 9, a position corresponding to amino acid 194 of SEQ ID NO: 9, a position corresponding to amino acid 213 of SEQ ID NO: 9, a position corresponding to amino acid 335 of SEQ ID NO: 9, and combinations thereof. In certain embodiments that may be combined with any of the preceding embodiments, the recombinant cellodextrin transporter contains an amino acid substitution at one or more positions corresponding to positions of the amino acid sequence of SEQ ID NO: 9 (CDT-1), where the one or more amino acid substitutions are at selected from a glycine (G) to alanine (A) substitution at a position corresponding to amino acid 91 of SEQ ID NO: 9, a glutamine (Q) to alanine (A) substitution at a position corresponding to amino acid 104 of SEQ ID NO: 9, a phenylalanie (F) to alanine (A) substitution at a position corresponding to amino acid 170 of SEQ ID NO: 9, an arginine (R) to alanine (A) substitution at a position corresponding to amino acid 174 of SEQ ID NO: 9, a glutamate (E) to alanine (A) substitution at a position corresponding to amino acid 194 of SEQ ID NO: 9, a phenylalanie (F) to lysine (L) substitution at a position corresponding to amino acid 213 of SEQ ID NO: 9, a phenylalanie (F) to alanine (A) substitution at a position corresponding to amino acid 335 of SEQ ID NO: 9, and combinations thereof. In certain embodiments that may be combined with any of the preceding embodiments, the recombinant polypeptide having β-glucosidase activity contains two or more sequences selected from F-x-[FYWM]-[GSTA]-x-1-x-[GSTA]-x-[GSTA](2)-[FYNH]-[NQ]-x-E-x-[GSTA] (SEQ ID NO: 16), [LIVMFSTC]-[LIVFYS]-[LIV]-[LIVMST]-E-N-G-[LIVMFAR]-[CSAGN] (SEQ ID NO: 17), and [LIVM](2)-[KR]-x-[EQKRD]-x(4)-G-[LIVMFTC]-[LIVT]-[LIVMF]-[ST]-D-x(2)-[SGADNIT] (SEQ ID NO: 18). In certain embodiments that may be combined with any of the preceding embodiments, the recombinant polypeptide β-glucosidase activity contains an amino acid sequence that is least 29%, at least 30%, at least 35%, at least 40%, at least 45%, at least 50%, at least 55%, at least 60%, at least 65%, at least 70%, at least 75%, at least 80%, at least 85%, at least 90%, at least 95%, at least 99%, or at least 100% amino acid identical to the amino acid sequence of NCU00130.

[0026] In certain embodiments that may be combined with any of the preceding embodiments, the host cell further contains one or more glucose response genes, where the activity level of a protein encoded by at least one glucose response gene is altered compared to the wild-type activity level of the protein. In certain embodiments, the one or more glucose response genes are selected from Snf3, Rgt1, Rgt2, Yck1/2, Std1, Mthy1, Snf1/4, Grr1, Gpr1, Gpa2, Ras2, Stb3, Hxk2, Pfk27, Pfk26, Sch9, Yak1, Mig1, Rim15, Kcs1, and Tps1. In certain embodiments that may be combined with any of the preceding embodiments, the activity level of one or more proteins encoded by the one or more glucose response genes is increased compared to its wild-type activity level. In certain embodiments that may be combined with any of the preceding embodiments, the activity level of one or more proteins encoded by the one or more glucose response genes is decreased compared to its wild-type activity level. In certain embodiments that may be combined with any of the preceding embodiments, the source of cellodextrin contains cellulose. In certain embodiments that may be combined with any of the preceding embodiments, the cellodextrin is selected from one or more of the group consisting of cellobiose, cellotriose, cellotetraose, cellopentose, and cellohexose. In certain embodiments that may be combined with any of the preceding embodiments, the hydrocarbons or hydrocarbon derivatives can be used as fuel. In certain embodiments that may be combined with any of the preceding embodiments, the hydrocarbons or hydrocarbon derivatives contain ethanol. In certain embodiments, the ethanol is produced at a rate that ranges from at least about 0.10 to at least 20 g/L-h. In certain embodiments that may be combined with any of the preceding embodiments, the hydrocarbons or hydrocarbon derivatives contain butanol. In certain embodiments that may be combined with any of the preceding embodiments, the host cell is a fungal cell. In certain embodiments that may be combined with any of the preceding embodiments, the host cell is a yeast cell. In certain embodiments, the yeast cell is S. cerevisiae.

[0027] Other aspects of the present disclosure relate to a host cell containing a recombinant cellodextrin transporter, and a recombinant polypeptide containing G-x(2)-[FY]-x-N-[AGS]-x-[AS]-W-[APS]-V-[IL]-[AS]-x(2)-A-x(2)-[DE]-x-[AI]-x(3)-[LMV]-[DEN]-[ASV]-[ILV]-x(3)-L-x-T-x(2)-G-[ILV]-x(2)-[SV]-x-P-[AG] (SEQ ID NO: 14) or Y-Q-[CN]-M-[IV]-T-F-[CN]-[FILMV]-[AS]-R-[ST]-[AS]-S-[FY]-[FY]-E-[STV]-G-x-[GS]-R-G-[IM]-G-F-R-D-S-[ACNS]-Q-D-[ILV]-[ILMV]-G-x-V-H-x-[IV]-P-[ADEST]-x-[AV]-[KR]-[AEQ]-x-[IL]-[FIL]-D (SEQ ID NO: 15), where the recombinant polypeptide has cellodextrin phosphorylase activity. In certain embodiments, the recombinant polypeptide contains an amino acid sequence that has at least 29%, at least 30%, at least 35%, at least 40%, at least 45%, at least 50%, at least 55%, at least 60%, at least 65%, at least 70%, at least 75%, at least 80%, at least 85%, at least 90%, at least 95%, at least 99%, or at least 100% amino acid identity to the amino acid sequence of CDP_Clent, CDP_Ctherm, or CDP_Acell. In certain embodiments, the recombinant polypeptide has cellobiose phosphorylase activity. In certain embodiments, the recombinant polypeptide contains an amino acid sequence that has at least 29%, at least 30%, at least 35%, at least 40%, at least 45%, at least 50%, at least 55%, at least 60%, at least 65%, at least 70%, at least 75%, at least 80%, at least 85%, at least 90%, at least 95%, at least 99%, or at least 100% amino acid identity to an amino acid sequence selected from SEQ ID NO: 11 (CgCBP), SEQ ID NO: 12 (SdCBP), and SEQ ID NO: 13 (CtCBP). In certain embodiments that may be combined with any of the preceding embodiments, the recombinant polypeptide contains one or more mutations. In certain embodiments, the one or more mutations are amino acid substitutions. In certain embodiments that may be combined with any of the preceding embodiments, the recombinant polypeptide contains an amino acid substitution at one or more positions corresponding to positions of the amino acid sequence of SEQ ID NO: 12 (SdCBP), where the one or more amino acid substitutions are selected from an isoleucine (I) to glutamine (Q) substitution at a position corresponding to amino acid 409 of SEQ ID NO: 12; an isoleucine (I) to methionine (M) substitution at a position corresponding to amino acid 409 of SEQ ID NO: 12; an asparagine (N) to aspartate (D) substitution at a position corresponding to amino acid 482 of SEQ ID NO: 12; an asparagine (N) to threonine (T) substitution at a position corresponding to amino acid 482 of SEQ ID NO: 12; a cysteine (C) to serine (S) substitution at a position corresponding to amino acid 484 of SEQ ID NO: 12; a cysteine (C) to alanine (A) substitution at a position corresponding to amino acid 484 of SEQ ID NO: 12; a phenylalanie (F) to tryptophan (W) substitution at a position corresponding to amino acid 651 of SEQ ID NO: 12; a histidine (H) to asparagine (N) substitution at a position corresponding to amino acid 653 of SEQ ID NO: 12; a histidine (H) to alanine (A) substitution at a position corresponding to amino acid 653 of SEQ ID NO: 12; and combinations thereof. In certain embodiments that may be combined with any of the preceding embodiments, the host cell further contains a recombinant phosphoglucomutase. In certain embodiments, the recombinant phosphoglucomutase contains a conserved motif having the amino acid sequence of [GSA]-[LIVMF]-x-[LIVM]-[ST]-[PGA]-S-H-[NIC]-P (SEQ ID NO: 19). In certain embodiments that may be combined with any of the preceding embodiments, the host cell further contains a recombinant hexokinase. In certain embodiments, the recombinant hexokinase contains a conserved motif having the amino acid sequence of [LIVM]-G-F-[TN]-F-S-[FY]-P-x(5)-[LIVM]-[DNST]-x(3)-[LIVM]-x(2)-W-T-K-x-[LF] (SEQ ID NO: 20). In certain embodiments, the recombinant hexokinase is HXK1.

[0028] Other aspects of the present disclosure relate to a host cell containing a recombinant cellodextrin transporter and a recombinant phosphoglucomutase. In certain embodiments, the recombinant phosphoglucomutase contains a conserved motif having the amino acid sequence of [GSA]-[LIVMF]-x-[LIVM]-[ST]-[PGA]-S-H-[NIC]-P (SEQ ID NO: 19). In certain embodiments that may be combined with any of the preceding embodiments, the host cell further contains a recombinant hexokinase. In certain embodiments, the recombinant hexokinase contains a conserved motif having the amino acid sequence of [LIVM]-G-F-[TN]-F-S-[FY]-P-x(5)-[LIVM]-[DNST]-x(3)-[LIVM]-x(2)-W-T-K-x-[LF] (SEQ ID NO: 20). In certain embodiments, the recombinant hexokinase is HXK1.

[0029] Other aspects of the present disclosure relate to a host cell containing a recombinant cellodextrin transporter and a recombinant hexokinase. In certain embodiments, the recombinant hexokinase contains a conserved motif having the amino acid sequence of [LIVM]-G-F-[TN]-F-S-[FY]-P-x(5)-[LIVM]-[DNST]-x(3)-[LIVM]-x(2)-W-T-K-x-[LF] (SEQ ID NO: 20). In certain embodiments, the recombinant hexokinase is HXK1. In certain embodiments that may be combined with any of the preceding embodiments, the host cell further contains a recombinant phosphoglucomutase. In certain embodiments, the recombinant phosphoglucomutase contains a conserved motif having the amino acid sequence of [GSA]-[LIVMF]-x-[LIVM]-[ST]-[PGA]-S-H-[NIC]-P (SEQ ID NO: 19).

[0030] In certain embodiments that may be combined with any of the preceding embodiments, the host cell further contains a recombinant polypeptide containing G-x(2)-[FY]-x-N-[AGS]-x-[AS]-W-[APS]-V-[IL]-[AS]-x(2)-A-x(2)-[DE]-x-[AI]-x(3)-[LMV]-[DEN]-[ASV]-[ILV]-x(3)-L-x-T-x(2)-G-[ILV]-x(2)-[SV]-x-P-[AG] (SEQ ID NO: 14) or Y-Q-[CN]-M-[IV]-T-F-[CN]-[FILMV]-[AS]-R-[ST]-[AS]-S-[FY]-[FY]-E-[STV]-G-x-[GS]-R-G-[IM]-G-F-R-D-S-[ACNS]-Q-D-[ILV]-[ILMV]-G-x-V-H-x-[IV]-P-[ADEST]-x-[AV]-[KR]-[AEQ]-x-[IL]-[FIL]-D (SEQ ID NO: 15), where the recombinant polypeptide has cellodextrin phosphorylase activity. In certain embodiments, the recombinant polypeptide contains an amino acid sequence that has at least 29%, at least 30%, at least 35%, at least 40%, at least 45%, at least 50%, at least 55%, at least 60%, at least 65%, at least 70%, at least 75%, at least 80%, at least 85%, at least 90%, at least 95%, at least 99%, or at least 100% amino acid identity to the amino acid sequence of CDP_Clent, CDP_Ctherm, or CDP_Acell. In certain embodiments, the recombinant polypeptide has cellobiose phosphorylase activity. In certain embodiments, the recombinant polypeptide contains an amino acid sequence that has at least 29%, at least 30%, at least 35%, at least 40%, at least 45%, at least 50%, at least 55%, at least 60%, at least 65%, at least 70%, at least 75%, at least 80%, at least 85%, at least 90%, at least 95%, at least 99%, or at least 100% amino acid identity to an amino acid sequence selected from SEQ ID NO: 11 (CgCBP), SEQ ID NO: 12 (SdCBP), and SEQ ID NO: 13 (CtCBP). In certain embodiments that may be combined with any of the preceding embodiments, the recombinant polypeptide contains one or more mutations. In certain embodiments, the one or more mutations are amino acid substitutions. In certain embodiments that may be combined with any of the preceding embodiments, the recombinant polypeptide contains an amino acid substitution at one or more positions corresponding to positions of the amino acid sequence of SEQ ID NO: 12 (SdCBP), where the one or more amino acid substitutions are selected from an isoleucine (I) to glutamine (Q) substitution at a position corresponding to amino acid 409 of SEQ ID NO: 12; an isoleucine (I) to methionine (M) substitution at a position corresponding to amino acid 409 of SEQ ID NO: 12; an asparagine (N) to aspartate (D) substitution at a position corresponding to amino acid 482 of SEQ ID NO: 12; an asparagine (N) to threonine (T) substitution at a position corresponding to amino acid 482 of SEQ ID NO: 12; a cysteine (C) to serine (S) substitution at a position corresponding to amino acid 484 of SEQ ID NO: 12; a cysteine (C) to alanine (A) substitution at a position corresponding to amino acid 484 of SEQ ID NO: 12; a phenylalanie (F) to tryptophan (W) substitution at a position corresponding to amino acid 651 of SEQ ID NO: 12; a histidine (H) to asparagine (N) substitution at a position corresponding to amino acid 653 of SEQ ID NO: 12; a histidine (H) to alanine (A) substitution at a position corresponding to amino acid 653 of SEQ ID NO: 12; and combinations thereof. In certain embodiments that may be combined with any of the preceding embodiments, the host cell further contains a second recombinant polypeptide containing one or more sequences selected from F-x-[FYWM]-[GSTA]-x-[GSTA]-x-[GSTA](2)-[FYNH]-[NQ]-x-E-x-[GSTA] (SEQ ID NO: 18), [LIVMFSTC]-[LIVFYS]-[LIV]-[LIVMST]-E-N-G-[LIVMFAR]-[CSAGN] (SEQ ID NO: 19), and [LIVM](2)-[KR]-x-[EQKRD]-x(4)-G-[LIVMFTC]-[LIVT]-[LIVMF]-[ST]-D-x(2)-[SGADNIT] (SEQ ID NO: 20), where the second recombinant polypeptide has β-glucosidase activity. In certain embodiments, the second recombinant polypeptide contains two or more sequences selected from F-x-[FYWM]-[GSTA]-x-[GSTA]-x-[GSTA](2)-[FYNH]-[NQ]-x-E-x-[GSTA] (SEQ ID NO: 16), [LIVMFSTC]-[LIVFYS]-[LIV]-[LIVMST]-E-N-G-[LIVMFAR]-[CSAGN] (SEQ ID NO: 17), and [LIVM](2)-[KR]-x-[EQKRD]-x(4)-G-[LIVMFTC]-[LIVT]-[LIVMF]-[ST]-D-x(2)-[SGADNIT] (SEQ ID NO: 18). In certain embodiments that may be combined with any of the preceding embodiments, the second recombinant polypeptide contains an amino acid sequence that is least 29%, at least 30%, at least 35%, at least 40%, at least 45%, at least 50%, at least 55%, at least 60%, at least 65%, at least 70%, at least 75%, at least 80%, at least 85%, at least 90%, at least 95%, at least 99%, or at least 100% amino acid identical to the amino acid sequence of NCU00130.

[0031] Other aspects of the present disclosure relate to a host cell containing a recombinant cellodextrin transporter and a recombinant polypeptide containing one or more sequences selected from F-x-[FYWM]-[GSTA]-x-[GSTA]-x-[GSTA](2)-[FYNH]-[NQ]-x-E-x-[GSTA](SEQ ID NO: 18), [LIVMFSTC]-[LIVFYS]-[LIV]-[LIVMST]-E-N-G-[LIVMFAR]-[CSAGN](SEQ ID NO: 19), and [LIVM](2)-[KR]-x-[EQKRD]-x(4)-G-[LIVMFTC]-[LIVT]-[LIVMF]-[ST]-D-x(2)-[SGADNIT] (SEQ ID NO: 20), where the recombinant polypeptide has β-glucosidase activity. In certain embodiments, the recombinant polypeptide contains two or more sequences selected from F-x-[FYWM]-[GSTA]-x-[GSTA]-x-[GSTA](2)-[FYNH]-[NQ]-x-E-x-[GSTA] (SEQ ID NO: 16), [LIVMFSTC]-[LIVFYS]-[LIV]-[LIVMST]-E-N-G-[LIVMFAR]-[CSAGN] (SEQ ID NO: 17), and [LIVM](2)-[KR]-x-[EQKRD]-x(4)-G-[LIVMFTC]-[LIVT]-[LIVMF]-[ST]-D-x(2)-[SGADNIT] (SEQ ID NO: 18). In certain embodiments that may be combined with any of the preceding embodiments, the recombinant polypeptide contains an amino acid sequence that is least 29%, at least 30%, at least 35%, at least 40%, at least 45%, at least 50%, at least 55%, at least 60%, at least 65%, at least 70%, at least 75%, at least 80%, at least 85%, at least 90%, at least 95%, at least 99%, or at least 100% amino acid identical to the amino acid sequence of NCU00130. In certain embodiments that may be combined with any of the preceding embodiments, the host cell further contains a recombinant phosphoglucomutase. In certain embodiments, the recombinant phosphoglucomutase contains a conserved motif having the amino acid sequence of [GSA]-[LIVMF]-x-[LIVM]-[ST]-[PGA]-S-H-[NIC]-P (SEQ ID NO: 19). In certain embodiments that may be combined with any of the preceding embodiments, the host cell further contains a recombinant hexokinase. In certain embodiments, the recombinant hexokinase contains a conserved motif having the amino acid sequence of [LIVM]-G-F-[TN]-F-S-[FY]-P-x(5)-[LIVM]-[DNST]-x(3)-[LIVM]-x(2)-W-T-K-x-[LF] (SEQ ID NO: 20). In certain embodiments, the recombinant hexokinase is HXK1. In certain embodiments that may be combined with any of the preceding embodiments, the host cell further contains a second recombinant polypeptide containing Y-x(2)-G-x-[KR]-E-N-[AG]-[AG]-[IV]-F-x(2)-[ANST]-[NST]-x(2)-[AIV]-x(2)-[AGT]-x(4)-[AG]-x(4)-[ADNS] (SEQ ID NO: 233), Y-Q-[CN]-M-[IV]-T-F-[CN]-[FILMV]-[AS]-R-[ST]-[AS]-S-[FY]-[FY]-E-[STV]-G-x-[GS]-R-G-[IM]-G-F-R-D-S-[ACNS]-Q-D-[ILV]-[ILMV]-G-x-V-H-x-[IV]-P-[ADEST]-x-[AV]-[KR]-[AEQ]-x-[IL]-[FIL]-D (SEQ ID NO: 14), or G-x(2)-[FY]-x-N-[AGS]-x-[AS]-W-[APS]-V-[IL]-[AS]-x(2)-A-x(2)-[DE]-x-[AI]-x(3)-[LMV]-[DEN]-[ASV]-[ILV]-x(3)-L-x-T-x(2)-G-[ILV]-x(2)-[SV]-x-P-[AG] (SEQ ID NO: 15), where the second recombinant polypeptide has cellodextrin phosphorylase activity. In certain embodiments, the second recombinant polypeptide contains an amino acid sequence that has at least 29%, at least 30%, at least 35%, at least 40%, at least 45%, at least 50%, at least 55%, at least 60%, at least 65%, at least 70%, at least 75%, at least 80%, at least 85%, at least 90%, at least 95%, at least 99%, or at least 100% amino acid identity to the amino acid sequence of CDP_Clent, CDP_Ctherm, or CDP_Acell. In certain embodiments, the second recombinant polypeptide has cellobiose phosphorylase activity. In certain embodiments, the second recombinant polypeptide contains an amino acid sequence that has at least 29%, at least 30%, at least 35%, at least 40%, at least 45%, at least 50%, at least 55%, at least 60%, at least 65%, at least 70%, at least 75%, at least 80%, at least 85%, at least 90%, at least 95%, at least 99%, or at least 100% amino acid identity to an amino acid sequence selected from SEQ ID NO: 11 (CgCBP), SEQ ID NO: 12 (SdCBP), and SEQ ID NO: 13 (CtCBP). In certain embodiments that may be combined with any of the preceding embodiments, the second recombinant polypeptide contains one or more mutations. In certain embodiments, the one or more mutations are amino acid substitutions. In certain embodiments that may be combined with any of the preceding embodiments, the second recombinant polypeptide contains an amino acid substitution at one or more positions corresponding to positions of the amino acid sequence of SEQ ID NO: 12 (SdCBP), where the one or more amino acid substitutions are selected from an isoleucine (I) to glutamine (Q) substitution at a position corresponding to amino acid 409 of SEQ ID NO: 12; an isoleucine (I) to methionine (M) substitution at a position corresponding to amino acid 409 of SEQ ID NO: 12; an asparagine (N) to aspartate (D) substitution at a position corresponding to amino acid 482 of SEQ ID NO: 12; an asparagine (N) to threonine (T) substitution at a position corresponding to amino acid 482 of SEQ ID NO: 12; a cysteine (C) to serine (S) substitution at a position corresponding to amino acid 484 of SEQ ID NO: 12; a cysteine (C) to alanine (A) substitution at a position corresponding to amino acid 484 of SEQ ID NO: 12; a phenylalanie (F) to tryptophan (W) substitution at a position corresponding to amino acid 651 of SEQ ID NO: 12; a histidine (H) to asparagine (N) substitution at a position corresponding to amino acid 653 of SEQ ID NO: 12; a histidine (H) to alanine (A) substitution at a position corresponding to amino acid 653 of SEQ ID NO: 12; and combinations thereof.

[0032] In certain embodiments that may be combined with any of the preceding embodiments, the recombinant cellodextrin transporter contains a polypeptide selected from a polypeptide containing transmembrane α-helix 1, α-helix 2, α-helix 3, α-helix 4, α-helix 5, α-helix 6, α-helix 7, α-helix 8, α-helix 9, α-helix 10, α-helix 11, α-helix 12, and transmembrane α-helix 1 contains SEQ ID NO: 1; a polypeptide containing transmembrane α-helix 1, α-helix 2, α-helix 3, α-helix 4, α-helix 5, α-helix 6, α-helix 7, α-helix 8, α-helix 9, α-helix 10, α-helix 11, α-helix 12, and transmembrane α-helix 2 contains SEQ ID NO: 2; a polypeptide containing transmembrane α-helix 1, α-helix 2, α-helix 3, α-helix 4, α-helix 5, α-helix 6, α-helix 7, α-helix 8, α-helix 9, α-helix 10, α-helix 11, α-helix 12, and a loop connecting transmembrane α-helix 2 and transmembrane α-helix 3 contains SEQ ID NO: 3; a polypeptide containing transmembrane α-helix 1, α-helix 2, α-helix 3, α-helix 4, α-helix 5, α-helix 6, α-helix 7, α-helix 8, α-helix 9, α-helix 10, α-helix 11, α-helix 12, and transmembrane α-helix 5 contains SEQ ID NO: 4; a polypeptide containing transmembrane α-helix 1, α-helix 2, α-helix 3, α-helix 4, α-helix 5, α-helix 6, α-helix 7, α-helix 8, α-helix 9, α-helix 10, α-helix 11, α-helix 12, and transmembrane α-helix 6 contains SEQ ID NO: 5; a polypeptide containing transmembrane α-helix 1, α-helix 2, α-helix 3, α-helix 4, α-helix 5, α-helix 6, α-helix 7, α-helix 8, α-helix 9, α-helix 10, α-helix 11, α-helix 12, and sequence between transmembrane α-helix 6 and transmembrane α-helix 7 contains SEQ ID NO: 6; a polypeptide containing transmembrane α-helix 1, α-helix 2, α-helix 3, α-helix 4, α-helix 5, α-helix 6, α-helix 7, α-helix 8, α-helix 9, α-helix 10, α-helix 11, α-helix 12, and transmembrane α-helix 7 contains SEQ ID NO: 7; and a polypeptide containing transmembrane α-helix 1, α-helix 2, α-helix 3, α-helix 4, α-helix 5, α-helix 6, α-helix 7, α-helix 8, α-helix 9, α-helix 10, α-helix 11, α-helix 12, and transmembrane α-helix 10 and transmembrane α-helix 11 and the sequence between them contain SEQ ID NO: 8. In certain embodiments, the recombinant cellodextrin transporter is a cellobiose transporter. In certain embodiments, the cellobiose transporter has at least 29%, at least 30%, at least 35%, at least 40%, at least 45%, at least 50%, at least 55%, at least 60%, at least 65%, at least 70%, at least 75%, at least 80%, at least 85%, at least 90%, at least 95%, at least 99%, or at least 100% amino acid identity to SEQ ID NO: 9 (CDT-1) or SEQ ID NO: 10 (CDT-2). In certain embodiments that may be combined with any of the preceding embodiments, the recombinant cellodextrin transporter contains one or more mutations. In certain embodiments, the one or more mutations are amino acid substitutions. In certain embodiments that may be combined with any of the preceding embodiments, the recombinant cellodextrin transporter contains an amino acid substitution at one or more positions corresponding to positions of the amino acid sequence of SEQ ID NO: 9 (CDT-1), where the one or more amino acid substitutions are at positions selected from a position corresponding to amino acid 91 of SEQ ID NO: 9, a position corresponding to amino acid 104 of SEQ ID NO: 9, a position corresponding to amino acid 170 of SEQ ID NO: 9, a position corresponding to amino acid 174 of SEQ ID NO: 9, a position corresponding to amino acid 194 of SEQ ID NO: 9, a position corresponding to amino acid 213 of SEQ ID NO: 9, a position corresponding to amino acid 335 of SEQ ID NO: 9, and combinations thereof. In certain embodiments that may be combined with any of the preceding embodiments, the recombinant cellodextrin transporter contains an amino acid substitution at one or more positions corresponding to positions of the amino acid sequence of SEQ ID NO: 9 (CDT-1), where the one or more amino acid substitutions are at selected from a glycine (G) to alanine (A) substitution at a position corresponding to amino acid 91 of SEQ ID NO: 9, a glutamine (Q) to alanine (A) substitution at a position corresponding to amino acid 104 of SEQ ID NO: 9, a phenylalanie (F) to alanine (A) substitution at a position corresponding to amino acid 170 of SEQ ID NO: 9, an arginine (R) to alanine (A) substitution at a position corresponding to amino acid 174 of SEQ ID NO: 9, a glutamate (E) to alanine (A) substitution at a position corresponding to amino acid 194 of SEQ ID NO: 9, a phenylalanie (F) to lysine (L) substitution at a position corresponding to amino acid 213 of SEQ ID NO: 9, a phenylalanie (F) to alanine (A) substitution at a position corresponding to amino acid 335 of SEQ ID NO: 9, and combinations thereof.

[0033] Other aspects of the present disclosure relate to a host cell containing a recombinant phosphoglucomutase, and a recombinant polypeptide containing Y-x(2)-G-x-[KR]-E-N-[AG]-[AG]-[IV]-F-x(2)-[ANST]-[NST]-x(2)-[AIV]-x(2)-[AGT]-x(4)-[AG]-x(4)-[ADNS] (SEQ ID NO: 233), Y-Q-[CN]-M-[IV]-T-F-[CN]-[FILMV]-[AS]-R-[ST]-[AS]-S-[FY]-[FY]-E-[STV]-G-x-[GS]-R-G-[IM]-G-F-R-D-S-[ACNS]-Q-D-[ILV]-[ILMV]-G-x-V-H-x-[IV]-P-[ADEST]-x-[AV]-[KR]-[AEQ]-x-[IL]-[FIL]-D (SEQ ID NO: 14), or G-x(2)-[FY]-x-N-[AGS]-x-[AS]-W-[APS]-V-[IL]-[AS]-x(2)-A-x(2)-[DE]-x-[AI]-x(3)-[LMV]-[DEN]-[ASV]-[ILV]-x(3)-L-x-T-x(2)-G-[ILV]-x(2)-[SV]-x-P-[AG] (SEQ ID NO: 15), where the recombinant polypeptide has cellodextrin phosphorylase activity. In certain embodiments, the recombinant phosphoglucomutase contains a conserved motif having the amino acid sequence of [GSA]-[LIVMF]-x-[LIVM]-[ST]-[PGA]-S-H-[NIC]-P (SEQ ID NO: 19). In certain embodiments that may be combined with any of the preceding embodiments, the host cell further contains a recombinant hexokinase. In certain embodiments, the recombinant hexokinase contains a conserved motif having the amino acid sequence of [LIVM]-G-F-[TN]-F-S-[FY]-P-x(5)-[LIVM]-[DNST]-x(3)-[LIVM]-x(2)-W-T-K-x-[LF] (SEQ ID NO: 20). In certain embodiments, the recombinant hexokinase is HXK1.

[0034] Other aspects of the present disclosure relate to a host cell containing a recombinant hexokinase, and a recombinant polypeptide containing Y-x(2)-G-x-[KR]-E-N-[AG]-[AG]-[IV]-F-x(2)-[ANST]-[NST]-x(2)-[AIV]-x(2)-[AGT]-x(4)-[AG]-x(4)-[ADNS] (SEQ ID NO: 233), Y-Q-[CN]-M-[IV]-T-F-[CN]-[FILMV]-[AS]-R-[ST]-[AS]-S-[FY]-[FY]-E-[STV]-G-x-[GS]-R-G-[IM]-G-F-R-D-S-[ACNS]-Q-D-[ILV]-[ILMV]-G-x-V-H-x-[IV]-P-[ADEST]-x-[AV]-[KR]-[AEQ]-x-[IL]-[FIL]-D (SEQ ID NO: 14), or G-x(2)-[FY]-x-N-[AGS]-x-[AS]-W-[APS]-V-[IL]-[AS]-x(2)-A-x(2)-[DE]-x-[AI]-x(3)-[LMV]-[DEN]-[ASV]-[ILV]-x(3)-L-x-T-x(2)-G-[ILV]-x(2)-[SV]-x-P-[AG] (SEQ ID NO: 15), where the recombinant polypeptide has cellodextrin phosphorylase activity. In certain embodiments, the recombinant hexokinase contains a conserved motif having the amino acid sequence of [LIVM]-G-F-[TN]-F-S-[FY]-P-x(5)-[LIVM]-[DNST]-x(3)-[LIVM]-x(2)-W-T-K-x-[LF] (SEQ ID NO: 20). In certain embodiments, the recombinant hexokinase is HXK1. In certain embodiments that may be combined with any of the preceding embodiments, the host cell further contains a recombinant phosphoglucomutase. In certain embodiments, the recombinant phosphoglucomutase contains a conserved motif having the amino acid sequence of [GSA]-[LIVMF]-x-[LIVM]-[ST]-[PGA]-S-H-[NIC]-P (SEQ ID NO: 19). In certain embodiments that may be combined with any of the preceding embodiments, the recombinant polypeptide contains an amino acid sequence that has at least 29%, at least 30%, at least 35%, at least 40%, at least 45%, at least 50%, at least 55%, at least 60%, at least 65%, at least 70%, at least 75%, at least 80%, at least 85%, at least 90%, at least 95%, at least 99%, or at least 100% amino acid identity to the amino acid sequence of CDP_Clent, CDP_Ctherm, or CDP_Acell. In certain embodiments that may be combined with any of the preceding embodiments, the recombinant polypeptide has cellobiose phosphorylase activity. In certain embodiments, the recombinant polypeptide contains an amino acid sequence that has at least 29%, at least 30%, at least 35%, at least 40%, at least 45%, at least 50%, at least 55%, at least 60%, at least 65%, at least 70%, at least 75%, at least 80%, at least 85%, at least 90%, at least 95%, at least 99%, or at least 100% amino acid identity to an amino acid sequence selected from SEQ ID NO: 11 (CgCBP), SEQ ID NO: 12 (SdCBP), and SEQ ID NO: 13 (CtCBP). In certain embodiments that may be combined with any of the preceding embodiments, the recombinant polypeptide contains one or more mutations. In certain embodiments, the one or more mutations are amino acid substitutions. In certain embodiments that may be combined with any of the preceding embodiments, the recombinant polypeptide contains an amino acid substitution at one or more positions corresponding to positions of the amino acid sequence of SEQ ID NO: 12 (SdCBP), where the one or more amino acid substitutions are selected from an isoleucine (I) to glutamine (Q) substitution at a position corresponding to amino acid 409 of SEQ ID NO: 12; an isoleucine (I) to methionine (M) substitution at a position corresponding to amino acid 409 of SEQ ID NO: 12; an asparagine (N) to aspartate (D) substitution at a position corresponding to amino acid 482 of SEQ ID NO: 12; an asparagine (N) to threonine (T) substitution at a position corresponding to amino acid 482 of SEQ ID NO: 12; a cysteine (C) to serine (S) substitution at a position corresponding to amino acid 484 of SEQ ID NO: 12; a cysteine (C) to alanine (A) substitution at a position corresponding to amino acid 484 of SEQ ID NO: 12; a phenylalanie (F) to tryptophan (W) substitution at a position corresponding to amino acid 651 of SEQ ID NO: 12; a histidine (H) to asparagine (N) substitution at a position corresponding to amino acid 653 of SEQ ID NO: 12; a histidine (H) to alanine (A) substitution at a position corresponding to amino acid 653 of SEQ ID NO: 12; and combinations thereof.

[0035] Other aspects of the present disclosure relate to a host cell containing a recombinant phosphoglucomutase and a recombinant hexokinase. In certain embodiments, the recombinant phosphoglucomutase contains a conserved motif having the amino acid sequence of [GSA]-[LIVMF]-x-[LIVM]-[ST]-[PGA]-S-H-[NIC]-P (SEQ ID NO: 19). In certain embodiments that may be combined with any of the preceding embodiments, the recombinant hexokinase contains a conserved motif having the amino acid sequence of [LIVM]-G-F-[TN]-F-S-[FY]-P-x(5)-[LIVM]-[DNST]-x(3)-[LIVM]-x(2)-W-T-K-x-[LF] (SEQ ID NO: 20). In certain embodiments, the recombinant hexokinase is HXK1. In certain embodiments that may be combined with any of the preceding embodiments, the host cell further contains a recombinant polypeptide containing G-x(2)-[FY]-x-N-[AGS]-x-[AS]-W-[APS]-V-[IL]-[AS]-x(2)-A-x(2)-[DE]-x-[AI]-x(3)-[LMV]-[DEN]-[ASV]-[ILV]-x(3)-L-x-T-x(2)-G-[ILV]-x(2)-[SV]-x-P-[AG] (SEQ ID NO: 14) or Y-Q-[CN]-M-[IV]-T-F-[CN]-[FILMV]-[AS]-R-[ST]-[AS]-S-[FY]-[FY]-E-[STV]-G-x-[GS]-R-G-[IM]-G-F-R-D-S-[ACNS]-Q-D-[ILV]-[ILMV]-G-x-V-H-x-[IV]-P-[ADEST]-x-[AV]-[KR]-[AEQ]-x-[IL]-[FIL]-D (SEQ ID NO: 15), where the recombinant polypeptide has cellodextrin phosphorylase activity. In certain embodiments, the recombinant polypeptide contains an amino acid sequence that has at least 29%, at least 30%, at least 35%, at least 40%, at least 45%, at least 50%, at least 55%, at least 60%, at least 65%, at least 70%, at least 75%, at least 80%, at least 85%, at least 90%, at least 95%, at least 99%, or at least 100% amino acid identity to the amino acid sequence of CDP_Clent, CDP_Ctherm, or CDP_Acell. In certain embodiments, the recombinant polypeptide has cellobiose phosphorylase activity. In certain embodiments, the recombinant polypeptide contains an amino acid sequence that has at least 29%, at least 30%, at least 35%, at least 40%, at least 45%, at least 50%, at least 55%, at least 60%, at least 65%, at least 70%, at least 75%, at least 80%, at least 85%, at least 90%, at least 95%, at least 99%, or at least 100% amino acid identity to an amino acid sequence selected from SEQ ID NO: 11 (CgCBP), SEQ ID NO: 12 (SdCBP), and SEQ ID NO: 13 (CtCBP). In certain embodiments that may be combined with any of the preceding embodiments, the recombinant polypeptide contains one or more mutations. In certain embodiments, the one or more mutations are amino acid substitutions. In certain embodiments that may be combined with any of the preceding embodiments, the recombinant polypeptide contains an amino acid substitution at one or more positions corresponding to positions of the amino acid sequence of SEQ ID NO: 12 (SdCBP), where the one or more amino acid substitutions are selected from an isoleucine (I) to glutamine (Q) substitution at a position corresponding to amino acid 409 of SEQ ID NO: 12; an isoleucine (I) to methionine (M) substitution at a position corresponding to amino acid 409 of SEQ ID NO: 12; an asparagine (N) to aspartate (D) substitution at a position corresponding to amino acid 482 of SEQ ID NO: 12; an asparagine (N) to threonine (T) substitution at a position corresponding to amino acid 482 of SEQ ID NO: 12; a cysteine (C) to serine (S) substitution at a position corresponding to amino acid 484 of SEQ ID NO: 12; a cysteine (C) to alanine (A) substitution at a position corresponding to amino acid 484 of SEQ ID NO: 12; a phenylalanie (F) to tryptophan (W) substitution at a position corresponding to amino acid 651 of SEQ ID NO: 12; a histidine (H) to asparagine (N) substitution at a position corresponding to amino acid 653 of SEQ ID NO: 12; a histidine (H) to alanine (A) substitution at a position corresponding to amino acid 653 of SEQ ID NO: 12; and combinations thereof.

[0036] In certain embodiments that may be combined with any of the preceding embodiments, the host cell further contains a second recombinant polypeptide containing one or more sequences selected from F-x-[FYWM]-[GSTA]-x-[GSTA]-x-[GSTA](2)-[FYNH]-[NQ]-x-E-x-[GSTA] (SEQ ID NO: 18), [LIVMFSTC]-[LIVFYS]-[LIV]-[LIVMST]-E-N-G-[LIVMFAR]-[CSAGN] (SEQ ID NO: 19), and [LIVM](2)-[KR]-x-[EQKRD]-x(4)-G-[LIVMFTC]-[LIVT]-[LIVMF]-[ST]-D-x(2)-[SGADNIT] (SEQ ID NO: 20), where the second recombinant polypeptide has β-glucosidase activity. In certain embodiments, the second recombinant polypeptide contains two or more sequences selected from F-x-[FYWM]-[GSTA]-x-[GSTA]-x-[GSTA](2)-[FYNH]-[NQ]-x-E-x-[GSTA] (SEQ ID NO: 16), [LIVMFSTC]-[LIVFYS]-[LIV]-[LIVMST]-E-N-G-[LIVMFAR]-[CSAGN] (SEQ ID NO: 17), and [LIVM](2)-[KR]-x-[EQKRD]-x(4)-G-[LIVMFTC]-[LIVT]-[LIVMF]-[ST]-D-x(2)-[SGADNIT] (SEQ ID NO: 18). In certain embodiments that may be combined with any of the preceding embodiments, the second recombinant polypeptide contains an amino acid sequence that is least 29%, at least 30%, at least 35%, at least 40%, at least 45%, at least 50%, at least 55%, at least 60%, at least 65%, at least 70%, at least 75%, at least 80%, at least 85%, at least 90%, at least 95%, at least 99%, or at least 100% amino acid identical to the amino acid sequence of NCU00130.

[0037] Other aspects of the present disclosure relate to a host cell containing: a first recombinant polypeptide containing Y-x(2)-G-x-[KR]-E-N-[AG]-[AG]-[IV]-F-x(2)-[ANST]-[NST]-x(2)-[AIV]-x(2)-[AGT]-x(4)-[AG]-x(4)-[ADNS] (SEQ ID NO: 233), Y-Q-[CN]-M-[IV]-T-F-[CN]-[FILMV]-[AS]-R-[ST]-[AS]-S-[FY]-[FY]-E-[STV]-G-x-[GS]-R-G-[IM]-G-F-R-D-S-[ACNS]-Q-D-[ILV]-[ILMV]-G-x-V-H-x-[IV]-P-[ADEST]-x-[AV]-[KR]-[AEQ]-x-[IL]-[FIL]-D (SEQ ID NO: 14), or G-x(2)-[FY]-x-N-[AGS]-x-[AS]-W-[APS]-V-[IL]-[AS]-x(2)-A-x(2)-[DE]-x-[AI]-x(3)-[LMV]-[DEN]-[ASV]-[ILV]-x(3)-L-x-T-x(2)-G-[ILV]-x(2)-[SV]-x-P-[AG] (SEQ ID NO: 15), where the first recombinant polypeptide has cellodextrin phosphorylase activity, and a second recombinant polypeptide containing one or more sequences selected from F-x-[FYWM]-[GSTA]-x-[GSTA]-x-[GSTA](2)-[FYNH]-[NQ]-x-E-x-[GSTA] (SEQ ID NO: 18), [LIVMFSTC]-[LIVFYS]-[LIV]-[LIVMST]-E-N-G-[LIVMFAR]-[CSAGN] (SEQ ID NO: 19), and [LIVM](2)-[KR]-x-[EQKRD]-x(4)-G-[LIVMFTC]-[LIVT]-[LIVMF]-[ST]-D-x(2)-[SGADNIT] (SEQ ID NO: 20), where the second recombinant polypeptide has β-glucosidase activity. In certain embodiments, the first recombinant polypeptide contains an amino acid sequence that has at least 29%, at least 30%, at least 35%, at least 40%, at least 45%, at least 50%, at least 55%, at least 60%, at least 65%, at least 70%, at least 75%, at least 80%, at least 85%, at least 90%, at least 95%, at least 99%, or at least 100% amino acid identity to the amino acid sequence of CDP_Clent, CDP_Ctherm, or CDP_Acell. In certain embodiments, the first recombinant polypeptide has cellobiose phosphorylase activity. In certain embodiments, the first recombinant polypeptide contains an amino acid sequence that has at least 29%, at least 30%, at least 35%, at least 40%, at least 45%, at least 50%, at least 55%, at least 60%, at least 65%, at least 70%, at least 75%, at least 80%, at least 85%, at least 90%, at least 95%, at least 99%, or at least 100% amino acid identity to an amino acid sequence selected from SEQ ID NO: 11 (CgCBP), SEQ ID NO: 12 (SdCBP), and SEQ ID NO: 13 (CtCBP). In certain embodiments that may be combined with any of the preceding embodiments, the first recombinant polypeptide contains one or more mutations. In certain embodiments, the one or more mutations are amino acid substitutions. In certain embodiments that may be combined with any of the preceding embodiments, the first recombinant polypeptide contains an amino acid substitution at one or more positions corresponding to positions of the amino acid sequence of SEQ ID NO: 12 (SdCBP), where the one or more amino acid substitutions are selected from an isoleucine (I) to glutamine (Q) substitution at a position corresponding to amino acid 409 of SEQ ID NO: 12; an isoleucine (I) to methionine (M) substitution at a position corresponding to amino acid 409 of SEQ ID NO: 12; an asparagine (N) to aspartate (D) substitution at a position corresponding to amino acid 482 of SEQ ID NO: 12; an asparagine (N) to threonine (T) substitution at a position corresponding to amino acid 482 of SEQ ID NO: 12; a cysteine (C) to serine (S) substitution at a position corresponding to amino acid 484 of SEQ ID NO: 12; a cysteine (C) to alanine (A) substitution at a position corresponding to amino acid 484 of SEQ ID NO: 12; a phenylalanie (F) to tryptophan (W) substitution at a position corresponding to amino acid 651 of SEQ ID NO: 12; a histidine (H) to asparagine (N) substitution at a position corresponding to amino acid 653 of SEQ ID NO: 12; a histidine (H) to alanine (A) substitution at a position corresponding to amino acid 653 of SEQ ID NO: 12; and combinations thereof. In certain embodiments that may be combined with any of the preceding embodiments, the host cell further contains a recombinant phosphoglucomutase. In certain embodiments, the recombinant phosphoglucomutase contains a conserved motif having the amino acid sequence of [GSA]-[LIVMF]-x-[LIVM]-[ST]-[PGA]-S-H-[NIC]-P (SEQ ID NO: 19). In certain embodiments that may be combined with any of the preceding embodiments, the host cell further contains a recombinant hexokinase. In certain embodiments, the recombinant hexokinase contains a conserved motif having the amino acid sequence of [LIVM]-G-F-[TN]-F-S-[FY]-P-x(5)-[LIVM]-[DNST]-x(3)-[LIVM]-x(2)-W-T-K-x-[LF] (SEQ ID NO: 20). In certain embodiments, the recombinant hexokinase is HXK1.

[0038] Other aspects of the present disclosure relate to a host cell containing a recombinant phosphoglucomutase, and a recombinant polypeptide containing one or more sequences selected from F-x-[FYWM]-[GSTA]-x-[GSTA]-x-[GSTA](2)-[FYNH]-[NQ]-x-E-x-[GSTA](SEQ ID NO: 18), [LIVMFSTC]-[LIVFYS]-[LIV]-[LIVMST]-E-N-G-[LIVMFAR]-[CSAGN](SEQ ID NO: 19), and [LIVM](2)-[KR]-x-[EQKRD]-x(4)-G-[LIVMFTC]-[LIVT]-[LIVMF]-[ST]-D-x(2)-[SGADNIT] (SEQ ID NO: 20), where the recombinant polypeptide has β-glucosidase activity. In certain embodiments, the recombinant phosphoglucomutase contains a conserved motif having the amino acid sequence of [GSA]-[LIVMF]-x-[LIVM]-[ST]-[PGA]-S-H-[NIC]-P (SEQ ID NO: 19). In certain embodiments that may be combined with any of the preceding embodiments, the host cell further contains a recombinant hexokinase. In certain embodiments, the recombinant hexokinase contains a conserved motif having the amino acid sequence of [LIVM]-G-F-[TN]-F-S-[FY]-P-x(5)-[LIVM]-[DNST]-x(3)-[LIVM]-x(2)-W-T-K-x-[LF] (SEQ ID NO: 20). In certain embodiments, the recombinant hexokinase is HXK1.

[0039] Other aspects of the present disclosure relate to a host cell containing a recombinant hexokinase, and a recombinant polypeptide containing one or more sequences selected from F-x-[FYWM]-[GSTA]-x-[GSTA]-x-[GSTA](2)-[FYNH]-[NQ]-x-E-x-[GSTA] (SEQ ID NO: 18), [LIVMFSTC]-[LIVFYS]-[LIV]-[LIVMST]-E-N-G-[LIVMFAR]-[CSAGN] (SEQ ID NO: 19), and [LIVM](2)-[KR]-x-[EQKRD]-x(4)-G-[LIVMFTC]-[LIVT]-[LIVMF]-[ST]-D-x(2)-[SGADNIT] (SEQ ID NO: 20), where the recombinant polypeptide has β-glucosidase activity. In certain embodiments, the recombinant hexokinase contains a conserved motif having the amino acid sequence of [LIVM]-G-F-[TN]-F-S-[FY]-P-x(5)-[LIVM]-[DNST]-x(3)-[LIVM]-x(2)-W-T-K-x-[LF] (SEQ ID NO: 20). In certain embodiments, the recombinant hexokinase is HXK1. In certain embodiments that may be combined with any of the preceding embodiments, the host cell further contains a recombinant phosphoglucomutase. In certain embodiments, the recombinant phosphoglucomutase contains a conserved motif having the amino acid sequence of [GSA]-[LIVMF]-x-[LIVM]-[ST]-[PGA]-S-H-[NIC]-P (SEQ ID NO: 19).

[0040] In certain embodiments that may be combined with any of the preceding embodiments, the host cell further contains a second recombinant polypeptide containing Y-x(2)-G-x-[KR]-E-N-[AG]-[AG]-[IV]-F-x(2)-[ANST]-[NST]-x(2)-[AIV]-x(2)-[AGT]-x(4)-[AG]-x(4)-[ADNS] (SEQ ID NO: 233), Y-Q-[CN]-M-[IV]-T-F-[CN]-[FILMV]-[AS]-R-[ST]-[AS]-S-[FY]-[FY]-E-[STV]-G-x-[GS]-R-G-[IM]-G-F-R-D-S-[ACNS]-Q-D-[ILV]-[ILMV]-G-x-V-H-x-[IV]-P-[ADEST]-x-[AV]-[KR]-[AEQ]-x-[IL]-[FIL]-D (SEQ ID NO: 14), or G-x(2)-[FY]-x-N-[AGS]-x-[AS]-W-[APS]-V-[IL]-[AS]-x(2)-A-x(2)-[DE]-x-[AI]-x(3)-[LMV]-[DEN]-[ASV]-[ILV]-x(3)-L-x-T-x(2)-G-[ILV]-x(2)-[SV]-x-P-[AG] (SEQ ID NO: 15), where the second recombinant polypeptide has cellodextrin phosphorylase activity. In certain embodiments, the second recombinant polypeptide contains an amino acid sequence that has at least 29%, at least 30%, at least 35%, at least 40%, at least 45%, at least 50%, at least 55%, at least 60%, at least 65%, at least 70%, at least 75%, at least 80%, at least 85%, at least 90%, at least 95%, at least 99%, or at least 100% amino acid identity to the amino acid sequence of CDP_Clent, CDP_Ctherm, or CDP_Acell. In certain embodiments, the second recombinant polypeptide has cellobiose phosphorylase activity. In certain embodiments, the second recombinant polypeptide contains an amino acid sequence that has at least 29%, at least 30%, at least 35%, at least 40%, at least 45%, at least 50%, at least 55%, at least 60%, at least 65%, at least 70%, at least 75%, at least 80%, at least 85%, at least 90%, at least 95%, at least 99%, or at least 100% amino acid identity to an amino acid sequence selected from SEQ ID NO: 11 (CgCBP), SEQ ID NO: 12 (SdCBP), and SEQ ID NO: 13 (CtCBP). In certain embodiments that may be combined with any of the preceding embodiments, the second recombinant polypeptide contains one or more mutations. In certain embodiments, the one or more mutations are amino acid substitutions. In certain embodiments that may be combined with any of the preceding embodiments, the second recombinant polypeptide contains an amino acid substitution at one or more positions corresponding to positions of the amino acid sequence of SEQ ID NO: 12 (SdCBP), where the one or more amino acid substitutions are selected from an isoleucine (I) to glutamine (Q) substitution at a position corresponding to amino acid 409 of SEQ ID NO: 12; an isoleucine (I) to methionine (M) substitution at a position corresponding to amino acid 409 of SEQ ID NO: 12; an asparagine (N) to aspartate (D) substitution at a position corresponding to amino acid 482 of SEQ ID NO: 12; an asparagine (N) to threonine (T) substitution at a position corresponding to amino acid 482 of SEQ ID NO: 12; a cysteine (C) to serine (S) substitution at a position corresponding to amino acid 484 of SEQ ID NO: 12; a cysteine (C) to alanine (A) substitution at a position corresponding to amino acid 484 of SEQ ID NO: 12; a phenylalanie (F) to tryptophan (W) substitution at a position corresponding to amino acid 651 of SEQ ID NO: 12; a histidine (H) to asparagine (N) substitution at a position corresponding to amino acid 653 of SEQ ID NO: 12; a histidine (H) to alanine (A) substitution at a position corresponding to amino acid 653 of SEQ ID NO: 12; and combinations thereof.

[0041] In certain embodiments that may be combined with any of the preceding embodiments, the host cell further contains a recombinant cellodextrin transporter containing a polypeptide selected from a polypeptide containing transmembrane α-helix 1, α-helix 2, α-helix 3, α-helix 4, α-helix 5, α-helix 6, α-helix 7, α-helix 8, α-helix 9, α-helix 10, α-helix 11, α-helix 12, and transmembrane α-helix 1 contains SEQ ID NO: 1; a polypeptide containing transmembrane α-helix 1, α-helix 2, α-helix 3, α-helix 4, α-helix 5, α-helix 6, α-helix 7, α-helix 8, α-helix 9, α-helix 10, α-helix 11, α-helix 12, and transmembrane α-helix 2 contains SEQ ID NO: 2; a polypeptide containing transmembrane α-helix 1, α-helix 2, α-helix 3, α-helix 4, α-helix 5, α-helix 6, α-helix 7, α-helix 8, α-helix 9, α-helix 10, α-helix 11, α-helix 12, and a loop connecting transmembrane α-helix 2 and transmembrane α-helix 3 contains SEQ ID NO: 3; a polypeptide containing transmembrane α-helix 1, α-helix 2, α-helix 3, α-helix 4, α-helix 5, α-helix 6, α-helix 7, α-helix 8, α-helix 9, α-helix 10, α-helix 11, α-helix 12, and transmembrane α-helix 5 contains SEQ ID NO: 4; a polypeptide containing transmembrane α-helix 1, α-helix 2, α-helix 3, α-helix 4, α-helix 5, α-helix 6, α-helix 7, α-helix 8, α-helix 9, α-helix 10, α-helix 11, α-helix 12, and transmembrane α-helix 6 contains SEQ ID NO: 5; a polypeptide containing transmembrane α-helix 1, α-helix 2, α-helix 3, α-helix 4, α-helix 5, α-helix 6, α-helix 7, α-helix 8, α-helix 9, α-helix 10, α-helix 11, α-helix 12, and sequence between transmembrane α-helix 6 and transmembrane α-helix 7 contains SEQ ID NO: 6; a polypeptide containing transmembrane α-helix 1, α-helix 2, α-helix 3, α-helix 4, α-helix 5, α-helix 6, α-helix 7, α-helix 8, α-helix 9, α-helix 10, α-helix 11, α-helix 12, and transmembrane α-helix 7 contains SEQ ID NO: 7; and a polypeptide containing transmembrane α-helix 1, α-helix 2, α-helix 3, α-helix 4, α-helix 5, α-helix 6, α-helix 7, α-helix 8, α-helix 9, α-helix 10, α-helix 11, α-helix 12, and transmembrane α-helix 10 and transmembrane α-helix 11 and the sequence between them contain SEQ ID NO: 8. In certain embodiments, the recombinant cellodextrin transporter is a cellobiose transporter. In certain embodiments, the cellobiose transporter has at least 29%, at least 30%, at least 35%, at least 40%, at least 45%, at least 50%, at least 55%, at least 60%, at least 65%, at least 70%, at least 75%, at least 80%, at least 85%, at least 90%, at least 95%, at least 99%, or at least 100% amino acid identity to SEQ ID NO: 9 (CDT-1) or SEQ ID NO: 10 (CDT-2). In certain embodiments that may be combined with any of the preceding embodiments, the recombinant cellodextrin transporter contains one or more mutations. In certain embodiments, the one or more mutations are amino acid substitutions. In certain embodiments that may be combined with any of the preceding embodiments, the recombinant cellodextrin transporter contains an amino acid substitution at one or more positions corresponding to positions of the amino acid sequence of SEQ ID NO: 9 (CDT-1), where the one or more amino acid substitutions are at positions selected from a position corresponding to amino acid 91 of SEQ ID NO: 9, a position corresponding to amino acid 104 of SEQ ID NO: 9, a position corresponding to amino acid 170 of SEQ ID NO: 9, a position corresponding to amino acid 174 of SEQ ID NO: 9, a position corresponding to amino acid 194 of SEQ ID NO: 9, a position corresponding to amino acid 213 of SEQ ID NO: 9, a position corresponding to amino acid 335 of SEQ ID NO: 9, and combinations thereof. In certain embodiments that may be combined with any of the preceding embodiments, the recombinant cellodextrin transporter contains an amino acid substitution at one or more positions corresponding to positions of the amino acid sequence of SEQ ID NO: 9 (CDT-1), where the one or more amino acid substitutions are at selected from a glycine (G) to alanine (A) substitution at a position corresponding to amino acid 91 of SEQ ID NO: 9, a glutamine (Q) to alanine (A) substitution at a position corresponding to amino acid 104 of SEQ ID NO: 9, a phenylalanie (F) to alanine (A) substitution at a position corresponding to amino acid 170 of SEQ ID NO: 9, an arginine (R) to alanine (A) substitution at a position corresponding to amino acid 174 of SEQ ID NO: 9, a glutamate (E) to alanine (A) substitution at a position corresponding to amino acid 194 of SEQ ID NO: 9, a phenylalanie (F) to lysine (L) substitution at a position corresponding to amino acid 213 of SEQ ID NO: 9, a phenylalanie (F) to alanine (A) substitution at a position corresponding to amino acid 335 of SEQ ID NO: 9, and combinations thereof. In certain embodiments that may be combined with any of the preceding embodiments, the recombinant polypeptide having β-glucosidase activity contains two or more sequences selected from F-x-[FYWM]-[GSTA]-x-[GSTA]-x-[GSTA](2)-[FYNH]-[NQ]-x-E-x-[GSTA] (SEQ ID NO: 16), [LIVMFSTC]-[LIVFYS]-[LIV]-[LIVMST]-E-N-G-[LIVMFAR]-[CSAGN] (SEQ ID NO: 17), and [LIVM](2)-[KR]-x-[EQKRD]-x(4)-G-[LIVMFTC]-[LIVT]-[LIVMF]-[ST]-D-x(2)-[SGADNIT] (SEQ ID NO: 18). In certain embodiments, the recombinant polypeptide having β-glucosidase activity contains an amino acid sequence that is least 29%, at least 30%, at least 35%, at least 40%, at least 45%, at least 50%, at least 55%, at least 60%, at least 65%, at least 70%, at least 75%, at least 80%, at least 85%, at least 90%, at least 95%, at least 99%, or at least 100% amino acid identical to the amino acid sequence of NCU00130.

[0042] In certain embodiments that may be combined with any of the preceding embodiments, the host cell further contains one or more glucose response genes, where the activity level of a protein encoded by at least one glucose response gene is altered compared to the wild-type activity level of the protein. In certain embodiments, the one or more glucose response genes are selected from Snf3, Rgt1, Rgt2, Yck1/2, Std1, Mthy1, Snf1/4, Grr1, Gpr1, Gpa2, Ras2, Stb3, Hxk2, Pfk27, Pfk26, Sch9, Yak1, Mig1, Rim15, Kcs1, and Tps1. In certain embodiments that may be combined with any of the preceding embodiments, the activity level of the protein encoded by at least one glucose response gene is increased compared to its wild-type activity level. In certain embodiments that may be combined with any of the preceding embodiments, the activity level of the protein encoded by at least one glucose response gene is decreased compared to its wild-type activity level. In certain embodiments that may be combined with any of the preceding embodiments, the host cell is a fungal cell. In certain embodiments that may be combined with any of the preceding embodiments, the host cell is a yeast cell. In certain embodiments, the yeast cell is S. cerevisiae.

[0043] Certain aspects of the present disclosure relate to a method for degrading cellodextrin, by: a) providing a host cell containing two or more of: a recombinant cellodextrin transporter, a recombinant polypeptide containing Y-x(2)-G-x-[KR]-E-N-[AG]-[AG]-[IV]-F-x(2)-[ANST]-[NST]-x(2)-[AIV]-x(2)-[AGT]-x(4)-[AG]-x(4)-[ADNS] (SEQ ID NO: 233), Y-Q-[CN]-M-[IV]-T-F-[CN]-[FILMV]-[AS]-R-[ST]-[AS]-S-[FY]-[FY]-E-[STV]-G-x-[GS]-R-G-[IM]-G-F-R-D-S-[ACNS]-Q-D-[ILV]-[ILMV]-G-x-V-H-x-[IV]-P-[ADEST]-x-[AV]-[KR]-[AEQ]-x-[IL]-[FIL]-D (SEQ ID NO: 14), or G-x(2)-[FY]-x-N-[AGS]-x-[AS]-W-[APS]-V-[IL]-[AS]-x(2)-A-x(2)-[DE]-x-[AI]-x(3)-[LMV]-[DEN]-[ASV]-[ILV]-x(3)-L-x-T-x(2)-G-[ILV]-x(2)-[SV]-x-P-[AG] (SEQ ID NO: 15), where the recombinant polypeptide has cellodextrin phosphorylase activity, a recombinant polypeptide containing one or more sequences selected from F-x-[FYWM]-[GSTA]-x-[GSTA]-x-[GSTA](2)-[FYNH]-[NQ]-x-E-x-[GSTA] (SEQ ID NO: 18), [LIVMFSTC]-[LIVFYS]-[LIV]-[LIVMST]-E-N-G-[LIVMFAR]-[CSAGN] (SEQ ID NO: 19), and [LIVM](2)-[KR]-x-[EQKRD]-x(4)-G-[LIVMFTC]-[LIVT]-[LIVMF]-[ST]-D-x(2)-[SGADNIT] (SEQ ID NO: 20), where the recombinant polypeptide has β-glucosidase activity, a recombinant phosphoglucomutase, and a recombinant hexokinase; and b) culturing the host cell in a medium containing cellodextrin or a source of cellodextrin, whereby cellodextrin is transported into the cell and degraded. Other aspects of the present disclosure relate to a method for producing hydrocarbons or hydrocarbon derivatives from cellodextrin, by: a) providing a host cell containing two or more of: a recombinant cellodextrin transporter, a recombinant polypeptide containing Y-x(2)-G-x-[KR]-E-N-[AG]-[AG]-[IV]-F-x(2)-[ANST]-[NST]-x(2)-[AIV]-x(2)-[AGT]-x(4)-[AG]-x(4)-[ADNS] (SEQ ID NO: 233), Y-Q-[CN]-M-[IV]-T-F-[CN]-[FILMV]-[AS]-R-[ST]-[AS]-S-[FY]-[FY]-E-[STV]-G-x-[GS]-R-G-[IM]-G-F-R-D-S-[ACNS]-Q-D-[ILV]-[ILMV]-G-x-V-H-x-[IV]-P-[ADEST]-x-[AV]-[KR]-[AEQ]-x-[IL]-[FIL]-D (SEQ ID NO: 14), or G-x(2)-[FY]-x-N-[AGS]-x-[AS]-W-[APS]-V-[IL]-[AS]-x(2)-A-x(2)-[DE]-x-[AI]-x(3)-[LMV]-[DEN]-[ASV]-[ILV]-x(3)-L-x-T-x(2)-G-[ILV]-x(2)-[SV]-x-P-[AG] (SEQ ID NO: 15), where the recombinant polypeptide has cellodextrin phosphorylase activity, a recombinant polypeptide containing one or more sequences selected from F-x-[FYWM]-[GSTA]-x-[GSTA]-x-[GSTA](2)-[FYNH]-[NQ]-x-E-x-[GSTA] (SEQ ID NO: 18), [LIVMFSTC]-[LIVFYS]-[LIV]-[LIVMST]-E-N-G-[LIVMFAR]-[CSAGN] (SEQ ID NO: 19), and [LIVM](2)-[KR]-x-[EQKRD]-x(4)-G-[LIVMFTC]-[LIVT]-[LIVMF]-[ST]-D-x(2)-[SGADNIT] (SEQ ID NO: 20), where the recombinant polypeptide has β-glucosidase activity, a recombinant phosphoglucomutase, and a recombinant hexokinase; and b) culturing the host cell in a medium containing cellodextrin or a source of cellodextrin, whereby cellodextrin is transported into the cell and degraded and whereby the host cell produces hydrocarbons or hydrocarbon derivatives from the cellodextrin. In certain embodiments that may be combined with any of the preceding embodiments, the host cell contains two or more, three or more, or four of: a recombinant cellodextrin transporter, a recombinant polypeptide containing Y-x(2)-G-x-[KR]-E-N-[AG]-[AG]-[IV]-F-x(2)-[ANST]-[NST]-x(2)-[AIV]-x(2)-[AGT]-x(4)-[AG]-x(4)-[ADNS] (SEQ ID NO: 233), Y-Q-[CN]-M-[IV]-T-F-[CN]-[FILMV]-[AS]-R-[ST]-[AS]-S-[FY]-[FY]-E-[STV]-G-x-[GS]-R-G-[IM]-G-F-R-D-S-[ACNS]-Q-D-[ILV]-[ILMV]-G-x-V-H-x-[IV]-P-[ADEST]-x-[AV]-[KR]-[AEQ]-x-[IL]-[FIL]-D (SEQ ID NO: 14), or G-x(2)-[FY]-x-N-[AGS]-x-[AS]-W-[APS]-V-[IL]-[AS]-x(2)-A-x(2)-[DE]-x-[AI]-x(3)-[LMV]-[DEN]-[ASV]-[ILV]-x(3)-L-x-T-x(2)-G-[ILV]-x(2)-[SV]-x-P-[AG] (SEQ ID NO: 15), where the recombinant polypeptide has cellodextrin phosphorylase activity, a recombinant polypeptide containing one or more sequences selected from F-x-[FYWM]-[GSTA]-x-[GSTA]-x-[GSTA](2)-[FYNH]-[NQ]-x-E-x-[GSTA] (SEQ ID NO: 18), [LIVMFSTC]-[LIVFYS]-[LIV]-[LIVMST]-E-N-G-[LIVMFAR]-[CSAGN] (SEQ ID NO: 19), and [LIVM](2)-[KR]-x-[EQKRD]-x(4)-G-[LIVMFTC]-[LIVT]-[LIVMF]-[ST]-D-x(2)-[SGADNIT] (SEQ ID NO: 20), where the recombinant polypeptide has β-glucosidase activity, a recombinant phosphoglucomutase, and a recombinant hexokinase.

[0044] In certain embodiments that may be combined with any of the preceding embodiments, the recombinant polypeptide having cellodextrin phosphorylase activity contains an amino acid sequence that has at least 29%, at least 30%, at least 35%, at least 40%, at least 45%, at least 50%, at least 55%, at least 60%, at least 65%, at least 70%, at least 75%, at least 80%, at least 85%, at least 90%, at least 95%, at least 99%, or at least 100% amino acid identity to the amino acid sequence of CDP_Clent, CDP_Ctherm, or CDP_Acell. In certain embodiments that may be combined with any of the preceding embodiments, the recombinant polypeptide having cellodextrin phosphorylase activity is a cellobiose phosphorylase. In certain embodiments, the cellobiose phosphorylase contains an amino acid sequence that has at least 29%, at least 30%, at least 35%, at least 40%, at least 45%, at least 50%, at least 55%, at least 60%, at least 65%, at least 70%, at least 75%, at least 80%, at least 85%, at least 90%, at least 95%, at least 99%, or at least 100% amino acid identity to an amino acid selected from SEQ ID NO: 11 (CgCBP), SEQ ID NO: 12 (SdCBP), and SEQ ID NO: 13 (CtCBP). In certain embodiments that may be combined with any of the preceding embodiments, the recombinant polypeptide having cellodextrin phosphorylase activity contains one or more mutations. In certain embodiments, the one or more mutations are amino acid substitutions. In certain embodiments that may be combined with any of the preceding embodiments, the recombinant polypeptide having cellodextrin phosphorylase activity contains an amino acid substitution at one or more positions corresponding to positions of the amino acid sequence of SEQ ID NO: 12 (SdCBP), where the one or more amino acid substitutions are selected from an isoleucine (I) to glutamine (Q) substitution at a position corresponding to amino acid 409 of SEQ ID NO: 12; an isoleucine (I) to methionine (M) substitution at a position corresponding to amino acid 409 of SEQ ID NO: 12; an asparagine (N) to aspartate (D) substitution at a position corresponding to amino acid 482 of SEQ ID NO: 12; an asparagine (N) to threonine (T) substitution at a position corresponding to amino acid 482 of SEQ ID NO: 12; a cysteine (C) to serine (S) substitution at a position corresponding to amino acid 484 of SEQ ID NO: 12; a cysteine (C) to alanine (A) substitution at a position corresponding to amino acid 484 of SEQ ID NO: 12; a phenylalanie (F) to tryptophan (W) substitution at a position corresponding to amino acid 651 of SEQ ID NO: 12; a histidine (H) to asparagine (N) substitution at a position corresponding to amino acid 653 of SEQ ID NO: 12; a histidine (H) to alanine (A) substitution at a position corresponding to amino acid 653 of SEQ ID NO: 12; and combinations thereof. In certain embodiments that may be combined with any of the preceding embodiments, the recombinant polypeptide having β-glucosidase activity contains two or more sequences selected from F-x-[FYWM]-[GSTA]-x-[GSTA]-x-[GSTA](2)-[FYNH]-[NQ]-x-E-x-[GSTA] (SEQ ID NO: 16), [LIVMFSTC]-[LIVFYS]-[LIV]-[LIVMST]-E-N-G-[LIVMFAR]-[CSAGN] (SEQ ID NO: 17), and [LIVM](2)-[KR]-x-[EQKRD]-x(4)-G-[LIVMFTC]-[LIVT]-[LIVMF]-[ST]-D-x(2)-[SGADNIT] (SEQ ID NO: 18). In certain embodiments that may be combined with any of the preceding embodiments, the recombinant polypeptide having β-glucosidase activity contains an amino acid sequence that is least 29%, at least 30%, at least 35%, at least 40%, at least 45%, at least 50%, at least 55%, at least 60%, at least 65%, at least 70%, at least 75%, at least 80%, at least 85%, at least 90%, at least 95%, at least 99%, or at least 100% amino acid identical to the amino acid sequence of NCU00130. In certain embodiments that may be combined with any of the preceding embodiments, the recombinant polypeptide having cellodextrin phosphorylase activity reduces ATP consumption as compared to a corresponding cell lacking the recombinant polypeptide having cellodextrin phosphorylase activity. In certain embodiments that may be combined with any of the preceding embodiments, the recombinant phosphoglucomutase contains a conserved motif having the amino acid sequence of [GSA]-[LIVMF]-x-[LIVM]-[ST]-[PGA]-S-H-[NIC]-P (SEQ ID NO: 19). In certain embodiments that may be combined with any of the preceding embodiments, the recombinant hexokinase contains a conserved motif having the amino acid sequence of [LIVM]-G-F-[TN]-F-S-[FY]-P-x(5)-[LIVM]-[DNST]-x(3)-[LIVM]-x(2)-W-T-K-x-[LF] (SEQ ID NO: 20). In certain embodiments, the recombinant hexokinase is HXK1. In certain embodiments that may be combined with any of the preceding embodiments, the recombinant cellodextrin transporter contains a polypeptide selected from a polypeptide containing transmembrane α-helix 1, α-helix 2, α-helix 3, α-helix 4, α-helix 5, α-helix 6, α-helix 7, α-helix 8, α-helix 9, α-helix 10, α-helix 11, α-helix 12, and transmembrane α-helix 1 contains SEQ ID NO: 1; a polypeptide containing transmembrane α-helix 1, α-helix 2, α-helix 3, α-helix 4, α-helix 5, α-helix 6, α-helix 7, α-helix 8, α-helix 9, α-helix 10, α-helix 11, α-helix 12, and transmembrane α-helix 2 contains SEQ ID NO: 2; a polypeptide containing transmembrane α-helix 1, α-helix 2, α-helix 3, α-helix 4, α-helix 5, α-helix 6, α-helix 7, α-helix 8, α-helix 9, α-helix 10, α-helix 11, α-helix 12, and a loop connecting transmembrane α-helix 2 and transmembrane α-helix 3 contains SEQ ID NO: 3; a polypeptide containing transmembrane α-helix 1, α-helix 2, α-helix 3, α-helix 4, α-helix 5, α-helix 6, α-helix 7, α-helix 8, α-helix 9, α-helix 10, α-helix 11, α-helix 12, and transmembrane α-helix 5 contains SEQ ID NO: 4; a polypeptide containing transmembrane α-helix 1, α-helix 2, α-helix 3, α-helix 4, α-helix 5, α-helix 6, α-helix 7, α-helix 8, α-helix 9, α-helix 10, α-helix 11, α-helix 12, and transmembrane α-helix 6 contains SEQ ID NO: 5; a polypeptide containing transmembrane α-helix 1, α-helix 2, α-helix 3, α-helix 4, α-helix 5, α-helix 6, α-helix 7, α-helix 8, α-helix 9, α-helix 10, α-helix 11, α-helix 12, and sequence between transmembrane α-helix 6 and transmembrane α-helix 7 contains SEQ ID NO: 6; a polypeptide containing transmembrane α-helix 1, α-helix 2, α-helix 3, α-helix 4, α-helix 5, α-helix 6, α-helix 7, α-helix 8, α-helix 9, α-helix 10, α-helix 11, α-helix 12, and transmembrane α-helix 7 contains SEQ ID NO: 7; and a polypeptide containing transmembrane α-helix 1, α-helix 2, α-helix 3, α-helix 4, α-helix 5, α-helix 6, α-helix 7, α-helix 8, α-helix 9, α-helix 10, α-helix 11, α-helix 12, and transmembrane α-helix 10 and transmembrane α-helix 11 and the sequence between them contains SEQ ID NO: 8. In certain embodiments, the recombinant cellodextrin transporter is a cellobiose transporter. In certain embodiments, the cellobiose transporter has at least 29%, at least 30%, at least 35%, at least 40%, at least 45%, at least 50%, at least 55%, at least 60%, at least 65%, at least 70%, at least 75%, at least 80%, at least 85%, at least 90%, at least 95%, at least 99%, or at least 100% amino acid identity to SEQ ID NO: 9 (CDT-1) or SEQ ID NO: 10 (CDT-2). In certain embodiments that may be combined with any of the preceding embodiments, the recombinant cellodextrin transporter contains one or more mutations. In certain embodiments, the one or more mutations are amino acid substitutions. In certain embodiments that may be combined with any of the preceding embodiments, the recombinant cellodextrin transporter contains an amino acid substitution at one or more positions corresponding to positions of the amino acid sequence of SEQ ID NO: 9 (CDT-1), where the one or more positions are at positions selected from a position corresponding to amino acid 91 of SEQ ID NO: 9, a position corresponding to amino acid 104 of SEQ ID NO: 9, a position corresponding to amino acid 170 of SEQ ID NO: 9, a position corresponding to amino acid 174 of SEQ ID NO: 9, a position corresponding to amino acid 194 of SEQ ID NO: 9, a position corresponding to amino acid 213 of SEQ ID NO: 9, a position corresponding to amino acid 335 of SEQ ID NO: 9, and combinations thereof. In certain embodiments that may be combined with any of the preceding embodiments, the recombinant cellodextrin transporter contains an amino acid substitution at one or more positions corresponding to positions of the amino acid sequence of SEQ ID NO: 9 (CDT-1), where the one or more amino acid substitutions are selected from a glycine (G) to alanine (A) substitution at a position corresponding to amino acid 91 of SEQ ID NO: 9, a glutamine (Q) to alanine (A) substitution at a position corresponding to amino acid 104 of SEQ ID NO: 9, a phenylalanie (F) to alanine (A) substitution at a position corresponding to amino acid 170 of SEQ ID NO: 9, an arginine (R) to alanine (A) substitution at a position corresponding to amino acid 174 of SEQ ID NO: 9, a glutamate (E) to alanine (A) substitution at a position corresponding to amino acid 194 of SEQ ID NO: 9, a phenylalanie (F) to lysine (L) substitution at a position corresponding to amino acid 213 of SEQ ID NO: 9, a phenylalanie (F) to alanine (A) substitution at a position corresponding to amino acid 335 of SEQ ID NO: 9, and combinations thereof. In certain embodiments that may be combined with any of the preceding embodiments, the host cell further contains one or more glucose response genes, where the activity level of a protein encoded by at least one glucose response gene is altered compared to the wild-type activity level of the protein. In certain embodiments, the one or more glucose response genes are selected from Snf3, Rgt1, Rgt2, Yck1/2, Std1, Mthy1, Snf1/4, Grr1, Gpr1, Gpa2, Ras2, Stb3, Hxk2, Pfk27, Pfk26, Sch9, Yak1, Mig1, Rim15, Kcs1, and Tps1. In certain embodiments that may be combined with any of the preceding embodiments, the activity level of one or more proteins encoded by the one or more glucose response genes is increased compared to its wild-type activity level. In certain embodiments that may be combined with any of the preceding embodiments, the activity level of one or more proteins encoded by the one or more glucose response genes is decreased compared to its wild-type activity level. In certain embodiments that may be combined with any of the preceding embodiments, the source of cellodextrin contains cellulose. In certain embodiments that may be combined with any of the preceding embodiments, the cellodextrin is selected from cellobiose, cellotriose, cellotetraose, cellopentose, and cellohexose. In certain embodiments that may be combined with any of the preceding embodiments, the hydrocarbons or hydrocarbon derivatives can be used as fuel. In certain embodiments that may be combined with any of the preceding embodiments, the hydrocarbons or hydrocarbon derivatives contain ethanol. In certain embodiments, the ethanol is produced at a rate that ranges from at least about 0.10 to at least 20 g/L-h. In certain embodiments that may be combined with any of the preceding embodiments, the hydrocarbons or hydrocarbon derivatives contain butanol. In certain embodiments that may be combined with any of the preceding embodiments, the host cell is a fungal cell. In certain embodiments that may be combined with any of the preceding embodiments, the host cell is a yeast cell. In certain embodiments, the yeast cell is S. cerevisiae.

[0045] Other aspects of the present disclosure relate to a host cell containing two or more of: a recombinant cellodextrin transporter, a recombinant polypeptide containing Y-x(2)-G-x-[KR]-E-N-[AG]-[AG]-[IV]-F-x(2)-[ANST]-[NST]-x(2)-[AIV]-x(2)-[AGT]-x(4)-[AG]-x(4)-[ADNS](SEQ ID NO: 233), Y-Q-[CN]-M-[IV]-T-F-[CN]-[FILMV]-[AS]-R-[ST]-[AS]-S-[FY]-[FY]-E-[STV]-G-x-[GS]-R-G-[IM]-G-F-R-D-S-[ACNS]-Q-D-[ILV]-[ILMV]-G-x-V-H-x-[IV]-P-[ADEST]-x-[AV]-[KR]-[AEQ]-x-[IL]-[FIL]-D (SEQ ID NO: 14), or G-x(2)-[FY]-x-N-[AGS]-x-[AS]-W-[APS]-V-[IL]-[AS]-x(2)-A-x(2)-[DE]-x-[AI]-x(3)-[LMV]-[DEN]-[ASV]-[ILV]-x(3)-L-x-T-x(2)-G-[ILV]-x(2)-[SV]-x-P-[AG] (SEQ ID NO: 15), where the recombinant polypeptide has cellodextrin phosphorylase activity, a recombinant polypeptide containing one or more sequences selected from F-x-[FYWM]-[GSTA]-x-[GSTA]-x-[GSTA](2)-[FYNH]-[NQ]-x-E-x-[GSTA] (SEQ ID NO: 18), [LIVMFSTC]-[LIVFYS]-[LIV]-[LIVMST]-E-N-G-[LIVMFAR]-[CSAGN] (SEQ ID NO: 19), and [LIVM](2)-[KR]-x-[EQKRD]-x(4)-G-[LIVMFTC]-[LIVT][LIVMF]-[ST]-D-x(2)-[SGADNIT] (SEQ ID NO: 20), where the recombinant polypeptide has β-glucosidase activity, a recombinant phosphoglucomutase, and a recombinant hexokinase. In certain embodiments, the host cell contains two or more, three or more, or four of: a recombinant cellodextrin transporter, a recombinant polypeptide containing Y-x(2)-G-x-[KR]-E-N-[AG]-[AG]-[IV]-F-x(2)-[ANST]-[NST]-x(2)-[AIV]-x(2)-[AGT]-x(4)-[AG]-x(4)-[ADNS] (SEQ ID NO: 233), Y-Q-[CN]-M-[IV]-T-F-[CN]-[FILMV]-[AS]-R-[ST]-[AS]-S-[FY]-[FY]-E-[STV]-G-x-[GS]-R-G-[IM]-G-F-R-D-S-[ACNS]-Q-D-[ILV]-[ILMV]-G-x-V-H-x-[IV]-P-[ADEST]-x-[AV]-[KR]-[AEQ]-x-[IL]-[FIL]-D (SEQ ID NO: 14), or G-x(2)-[FY]-x-N-[AGS]-x-[AS]-W-[APS]-V-[IL]-[AS]-x(2)-A-x(2)-[DE]-x-[AI]-x(3)-[LMV]-[DEN]-[ASV]-[ILV]-x(3)-L-x-T-x(2)-G-[ILV]-x(2)-[SV]-x-P-[AG] (SEQ ID NO: 15), where the recombinant polypeptide has cellodextrin phosphorylase activity, a recombinant polypeptide containing one or more sequences selected from F-x-[FYWM]-[GSTA]-x-[GSTA]-x-[GSTA](2)-[FYNH]-[NQ]-x-E-x-[GSTA] (SEQ ID NO: 18), [LIVMFSTC]-[LIVFYS]-[LIV]-[LIVMST]-E-N-G-[LIVMFAR]-[CSAGN] (SEQ ID NO: 19), and [LIVM](2)-[KR]-x-[EQKRD]-x(4)-G-[LIVMFTC]-[LIVT]-[LIVMF]-[ST]-D-x(2)-[SGADNIT] (SEQ ID NO: 20), where the recombinant polypeptide has β-glucosidase activity, a recombinant phosphoglucomutase, and a recombinant hexokinase.

[0046] In certain embodiments, the recombinant polypeptide having cellodextrin phosphorylase activity contains an amino acid sequence that has at least 29%, at least 30%, at least 35%, at least 40%, at least 45%, at least 50%, at least 55%, at least 60%, at least 65%, at least 70%, at least 75%, at least 80%, at least 85%, at least 90%, at least 95%, at least 99%, or at least 100% amino acid identity to the amino acid sequence of CDP_Clent, CDP_Ctherm, or CDP_Acell. In certain embodiments, the recombinant polypeptide having cellodextrin phosphorylase activity is a cellobiose phosphorylase. In certain embodiments, the recombinant cellobiose phosphorylase contains an amino acid sequence that has at least 29%, at least 30%, at least 35%, at least 40%, at least 45%, at least 50%, at least 55%, at least 60%, at least 65%, at least 70%, at least 75%, at least 80%, at least 85%, at least 90%, at least 95%, at least 99%, or at least 100% amino acid identity to an amino acid selected from SEQ ID NO: 11 (CgCBP), SEQ ID NO: 12 (SdCBP), and SEQ ID NO: 13 (CtCBP). In certain embodiments that may be combined with any of the preceding embodiments, the recombinant polypeptide having cellodextrin phosphorylase activity contains one or more mutations. In certain embodiments, the one or more mutations are amino acid substitutions. In certain embodiments that may be combined with any of the preceding embodiments, the recombinant polypeptide having cellodextrin phosphorylase activity contains an amino acid substitution at one or more positions corresponding to positions of the amino acid sequence of SEQ ID NO: 12 (SdCBP), where the one or more amino acid substitutions are selected from an isoleucine (I) to glutamine (Q) substitution at a position corresponding to amino acid 409 of SEQ ID NO: 12; an isoleucine (I) to methionine (M) substitution at a position corresponding to amino acid 409 of SEQ ID NO: 12; an asparagine (N) to aspartate (D) substitution at a position corresponding to amino acid 482 of SEQ ID NO: 12; an asparagine (N) to threonine (T) substitution at a position corresponding to amino acid 482 of SEQ ID NO: 12; a cysteine (C) to serine (S) substitution at a position corresponding to amino acid 484 of SEQ ID NO: 12; a cysteine (C) to alanine (A) substitution at a position corresponding to amino acid 484 of SEQ ID NO: 12; a phenylalanie (F) to tryptophan (W) substitution at a position corresponding to amino acid 651 of SEQ ID NO: 12; a histidine (H) to asparagine (N) substitution at a position corresponding to amino acid 653 of SEQ ID NO: 12; a histidine (H) to alanine (A) substitution at a position corresponding to amino acid 653 of SEQ ID NO: 12; and combinations thereof. In certain embodiments that may be combined with any of the preceding embodiments, the recombinant polypeptide having β-glucosidase activity contains two or more sequences selected from F-x-[FYWM]-[GSTA]-x-[GSTA]-x-[GSTA](2)-[FYNH]-[NQ]-x-E-x-[GSTA] (SEQ ID NO: 16), [LIVMFSTC]-[LIVFYS]-[LIV]-[LIVMST]-E-N-G-[LIVMFAR]-[CSAGN] (SEQ ID NO: 17), and [LIVM](2)-[KR]-x-[EQKRD]-x(4)-G-[LIVMFTC]-[LIVT]-[LIVMF]-[ST]-D-x(2)-[SGADNIT] (SEQ ID NO: 18). In certain embodiments that may be combined with any of the preceding embodiments, the recombinant polypeptide having β-glucosidase contains an amino acid sequence that is least 29%, at least 30%, at least 35%, at least 40%, at least 45%, at least 50%, at least 55%, at least 60%, at least 65%, at least 70%, at least 75%, at least 80%, at least 85%, at least 90%, at least 95%, at least 99%, or at least 100% amino acid identical to the amino acid sequence of NCU00130. In certain embodiments that may be combined with any of the preceding embodiments, the recombinant phosphoglucomutase contains a conserved motif having the amino acid sequence of [GSA]-[LIVMF]-x-[LIVM]-[ST]-[PGA]-S-H-[NIC]-P (SEQ ID NO: 19). In certain embodiments that may be combined with any of the preceding embodiments, the recombinant hexokinase contains a conserved motif having the amino acid sequence of [LIVM]-G-F-[TN]-F-S-[FY]-P-x(5)-[LIVM]-[DNST]-x(3)-[LIVM]-x(2)-W-T-K-x-[LF] (SEQ ID NO: 20). In certain embodiments, the recombinant hexokinase is HXK1. In certain embodiments that may be combined with any of the preceding embodiments, the recombinant cellodextrin transporter contains a polypeptide selected from a polypeptide containing transmembrane α-helix 1, α-helix 2, α-helix 3, α-helix 4, α-helix 5, α-helix 6, α-helix 7, α-helix 8, α-helix 9, α-helix 10, α-helix 11, α-helix 12, and transmembrane α-helix 1 contains SEQ ID NO: 1; a polypeptide containing transmembrane α-helix 1, α-helix 2, α-helix 3, α-helix 4, α-helix 5, α-helix 6, α-helix 7, α-helix 8, α-helix 9, α-helix 10, α-helix 11, α-helix 12, and transmembrane α-helix 2 contains SEQ ID NO: 2; a polypeptide containing transmembrane α-helix 1, α-helix 2, α-helix 3, α-helix 4, α-helix 5, α-helix 6, α-helix 7, α-helix 8, α-helix 9, α-helix 10, α-helix 11, α-helix 12, and a loop connecting transmembrane α-helix 2 and transmembrane α-helix 3 contains SEQ ID NO: 3; a polypeptide containing transmembrane α-helix 1, α-helix 2, α-helix 3, α-helix 4, α-helix 5, α-helix 6, α-helix 7, α-helix 8, α-helix 9, α-helix 10, α-helix 11, α-helix 12, and transmembrane α-helix 5 contains SEQ ID NO: 4; a polypeptide containing transmembrane α-helix 1, α-helix 2, α-helix 3, α-helix 4, α-helix 5, α-helix 6, α-helix 7, α-helix 8, α-helix 9, α-helix 10, α-helix 11, α-helix 12, and transmembrane α-helix 6 contains SEQ ID NO: 5; a polypeptide containing transmembrane α-helix 1, α-helix 2, α-helix 3, α-helix 4, α-helix 5, α-helix 6, α-helix 7, α-helix 8, α-helix 9, α-helix 10, α-helix 11, α-helix 12, and sequence between transmembrane α-helix 6 and transmembrane α-helix 7 contains SEQ ID NO: 6; a polypeptide containing transmembrane α-helix 1, α-helix 2, α-helix 3, α-helix 4, α-helix 5, α-helix 6, α-helix 7, α-helix 8, α-helix 9, α-helix 10, α-helix 11, α-helix 12, and transmembrane α-helix 7 contains SEQ ID NO: 7; and a polypeptide containing transmembrane α-helix 1, α-helix 2, α-helix 3, α-helix 4, α-helix 5, α-helix 6, α-helix 7, α-helix 8, α-helix 9, α-helix 10, α-helix 11, α-helix 12, and transmembrane α-helix 10 and transmembrane α-helix 11 and the sequence between them contains SEQ ID NO: 8. In certain embodiments, the recombinant cellodextrin transporter is a cellobiose transporter. In certain embodiments, the cellobiose transporter has at least 29%, at least 30%, at least 35%, at least 40%, at least 45%, at least 50%, at least 55%, at least 60%, at least 65%, at least 70%, at least 75%, at least 80%, at least 85%, at least 90%, at least 95%, at least 99%, or at least 100% amino acid identity to SEQ ID NO: 9 (CDT-1) or SEQ ID NO: 10 (CDT-2). In certain embodiments that may be combined with any of the preceding embodiments, the recombinant cellodextrin transporter contains one or more mutations. In certain embodiments, the one or more mutations are amino acid substitutions. In certain embodiments that may be combined with any of the preceding embodiments, the recombinant cellodextrin transporter contains an amino acid substitution at one or more positions corresponding to positions of the amino acid sequence of SEQ ID NO: 9 (CDT-1), where the one or more amino acid substitutions are at positions selected from a position corresponding to amino acid 91 of SEQ ID NO: 9, a position corresponding to amino acid 104 of SEQ ID NO: 9, a position corresponding to amino acid 170 of SEQ ID NO: 9, a position corresponding to amino acid 174 of SEQ ID NO: 9, a position corresponding to amino acid 194 of SEQ ID NO: 9, a position corresponding to amino acid 213 of SEQ ID NO: 9, a position corresponding to amino acid 335 of SEQ ID NO: 9, and combinations thereof. In certain embodiments that may be combined with any of the preceding embodiments, the recombinant cellodextrin transporter contains an amino acid substitution at one or more positions corresponding to positions of the amino acid sequence of SEQ ID NO: 9 (CDT-1), where the one or more amino acid substitutions are at positions selected from a glycine (G) to alanine (A) substitution at a position corresponding to amino acid 91 of SEQ ID NO: 9, a glutamine (Q) to alanine (A) substitution at a position corresponding to amino acid 104 of SEQ ID NO: 9, a phenylalanie (F) to alanine (A) substitution at a position corresponding to amino acid 170 of SEQ ID NO: 9, an arginine (R) to alanine (A) substitution at a position corresponding to amino acid 174 of SEQ ID NO: 9, a glutamate (E) to alanine (A) substitution at a position corresponding to amino acid 194 of SEQ ID NO: 9, a phenylalanie (F) to lysine (L) substitution at a position corresponding to amino acid 213 of SEQ ID NO: 9, a phenylalanie (F) to alanine (A) substitution at a position corresponding to amino acid 335 of SEQ ID NO: 9, and combinations thereof. In certain embodiments that may be combined with any of the preceding embodiments, the host cell further contains one or more glucose response genes, where the activity level of a protein encoded by at least one glucose response gene is altered compared to the wild-type activity level of the protein. In certain embodiments, the one or more glucose response genes are selected from Snf3, Rgt1, Rgt2, Yck1/2, Std1, Mthy1, Snf1/4, Grr1, Gpr1, Gpa2, Ras2, Stb3, Hxk2, Pfk27, Pfk26, Sch9, Yak1, Mig1, Rim15, Kcs1, and Tps1. In certain embodiments that may be combined with any of the preceding embodiments, the activity level of the protein encoded by at least one glucose response gene is increased compared to its wild-type activity level. In certain embodiments that may be combined with any of the preceding embodiments, the activity level of the protein encoded by at least one glucose response gene is decreased compared to its wild-type activity level. In certain embodiments that may be combined with any of the preceding embodiments, the host cell is a fungal cell. In certain embodiments that may be combined with any of the preceding embodiments, the host cell is a yeast cell. In certain embodiments, the yeast cell is S. cerevisiae.

### BRIEF DESCRIPTION OF THE DRAWINGS

[0047] FIG. 1 shows a comparison between metabolic pathways presently in yeast and a novel metabolic pathway of the present disclosure. The standard metabolic pathway in yeast is shown to the left of the hatched line. Here, glucose enters the cell through hexose transporters and is then phosphorylated by hexokinase to form glucose-6-phosphate. The novel metabolic pathway of the present disclosure is shown to the right of the hatched line. Here, cellodextrins enter the cell through cellodextrin transporters. One glucose moiety is subsequently cleaved off by a cellodextrin phosphorylase resulting in glucose-1-phosphate and a shortened cellodextrin. The glucose-1-phosphate is converted to glucose-6-phosphate by phosphoglucomutase. FIG. 1 shows the scheme when cellotriose is used as a carbon source.

[0048] FIG. 2 schematically shows two possible cellobiose fermentation pathways. Following transport across the plasma membrane by a cellodextrin transporter (CDT), cellobiose is cleaved either by hydrolysis (left panel) via a β-glucosidase (e.g., GH1) or by phosphorolysis (right panel) via a cellobiose phosphorylase (e.g., CBP). Intracellular glucose is formed in the hydrolytic pathway and is converted to glucose-6-phosphate (Glc6P) by hexokinase (HXK). Intracellular glucose and glucose-1-phosphate are formed in the phosphorolytic pathway. Here, glucose-1-phosphate is converted to Glc6P by phosphoglucomutase (PGM), while glucose is converted to Glc6P by HXK. In both pathways Glc6P is fermented to ethanol and CO₂ by endogenous yeast enzymes. Enzymes engineered into yeast are italicized.

[0049] FIG. 3 depicts the cellobiose fermentation profile of three engineered yeast strains each expressing the cellodextrin transporter gene cdt-1, and one of three cellobiose phosphorylase genes. The rate at which the strains fermented cellobiose (triangles) to ethanol (diamonds) was determined under oxygen limited conditions. The amount of produced biomass was also monitored (circles). Each profile was run independently duplicated, and there was less than 5% variance between replicates. Shown is a representative profile. FIG. 3A depicts the D452-2 strain of S. cerevisiae, transformed with cdt-1, and a codon-optimized cellobiose phosphorylase gene from C. gilvus. FIG. 3B depicts the D452-2 strain of S. cerevisiae, transformed with cdt-1, and a codon-optimized cellobiose phosphorylase gene from S. degradans. FIG. 3C depicts the D452-2 strain of S. cerevisiae, transformed with cdt-1, and a codon-optimized cellobiose phosphorylase gene from C. thermocellum.

[0050] FIG. 4 depicts the cellobiose fermentation profile of three engineered yeast strains each expressing the S. cerevisiae gene for PGM, along with the cellodextrin transporter gene cdt-1 and a cellobiose phosphorylase gene. The rate at which the strains fermented cellobiose (triangles) to ethanol (diamonds) was determined under oxygen limited conditions. The amount of produced biomass was also monitored (circles). Each profile was run independently duplicated, and there was less than 5% variance between replicates.

[0051] FIG. 5 depicts the fermentation profile of engineered yeast strains bearing a spontaneously derived mutant of the cellodextrin transporter gene cdt-1. The rate at which the strains fermented cellobiose (triangles) to ethanol (diamonds) was determined under oxygen limited conditions. The amount of produced biomass was also monitored (circles). All values are the means of the results for two independent fermentations, and error bars represent the standard deviations of the results between two fermentations. FIG. 5A depicts the D452-2 strain of S. cerevisiae transformed with WT cdt-1 and a codon-optimized cellobiose phosphorylase gene from S. degradans. FIG. 5B depicts the D452-2 strain of S. cerevisiae transformed with a mutant cdt-1 (F213L) and a codon-optimized cellobiose phosphorylase gene from S. degradans. FIG. 5C depicts the D452-2 strain of S. cerevisiae transformed with WT cdt-1 and the β-glucosidase gene gh1-1. FIG. 5D depicts the D452-2 strain of S. cerevisiae transformed with a mutant cdt-1 (F213L) and the β-glucosidase gene gh1-1.

[0052] FIG. 6A deceits time profiles of cellobiose fermentation with various mutant CDT-1 via the hydrolytic pathway. FIG. 6B depicts time profiles of cellobiose fermentation with various mutant CDT-1 via the phosphorolytic pathway.

[0053] FIG. 7 depicts cellobiose consumption and ethanol production of engineered yeast strains with various cellodextrin transporter gene (cdt-1) mutants (G91A, Q104A, F170A, R174A, E194A, F213L, and F335A). The D452-2 strain of S. cerevisiae was transformed with either WT cdt-1 or a cdt-1 mutant, and a codon-optimized cellobiose phosphorylase gene from S. degradans or the β-glucosidase gene gh1-1. Productivities with various cdt-1 mutants and cellobiose phosphorylase are depicted along the y-axis, while productivities with various cdt-1 mutants and β-glucosidase are depicted along the x-axis. All values are the means of the results for two independent fermentations, and error bars represent the standard deviations of the results between two fermentations. FIG. 7A depicts the rate of cellobiose consumption. FIG. 7B depicts the rate of ethanol production.

[0054] FIG. 8 depicts the transport kinetics of WT cdt-1 and three cdt-1 mutants. The linear rate of [³H] cellobiose uptake into engineered yeast strains expressing WT cdt-1, cdt-1 (G91A), cdt-1 (F335A), or cdt-1 (F213L), was determined using various concentrations of cellobiose. Error bars represent the standard deviation of three replicate measurements at each concentration. FIG. 8A depicts the transport kinetics of WT cdt-1. FIG. 8B depicts the transport kinetics of cdt-1 (G91A). FIG. 8C depicts the transport kinetics of cdt-1 (F335A). FIG. 8D depicts the transport kinetics of cdt-1 (F213L).

[0055] FIG. 9 depicts the correlation between expression levels of CDT-1 mutants and fermentation performance. Cellobiose was fermented to ethanol by engineered yeast strains with one GFP-tagged variant of CDT-1 and either the β-glucosidase GH1-1 or the cellobiose phosphorylase SdCBP. During the exponential phase of these fermentations, cells were harvested and GFP fluorescence measured and plotted after correcting for culture OD. Values shown are the mean of two fermentations and error bars represent the standard deviation between two fermentations. FIG. 9A depicts engineered yeast strains with one GFP-tagged variant of CDT-1 and the β-glucosidase GH1-1. FIG. 9B depicts engineered yeast strains with one GFP-tagged variant of CDT-1 and the cellobiose phosphorylase SdCBP.

[0056] FIG. 10 depicts the activity of purified β-glucosidase GH1-1, S. degradans cellobiose phosphorylase SdCBP, and S. cerevisiae hexokinases in cell extracts. Cell extracts were harvested from D452-2 yeast growing on rich glucose media (YPD80), and from engineered D452-2 yeast expressing the cellodextrin transporter CDT-1 and either the β-glucosidase GH1-1 or the S. degradans cellobiose phosphorylase SdCBP growing on rich cellobiose media (YPC80). The amount of hexokinase activity, or cellobiase activity (defined as the rate of glucose released regardless of the mechanism) in 10 μg of extract was determined. In addition the amount of transporter present in each strain was estimated by measuring GFP fluorescence. Results are the mean+/−the standard deviation of three cultures. FIG. 10A depicts transporter abundance. FIG. 10B depicts cellobiose activity. FIG. 10C depicts hexokinase activity.

[0057] FIG. 11 depicts transglycosylation activity of the β-glucosidase GH1-1. 200 pkat of either purified GH1-1 was incubated with 20% (w/v) cellobiose for 24 hours at 30° C. in 50 mM phosphate buffer, pH 6.0. The same incubation was carried out without the addition of enzyme as a control. The products were then analyzed by HPLC.

[0058] FIG. 12 depicts the characteristics of purified GH-1 and SdCBP enzymes. The β-glucosidase GH1-1 and the S. degradans cellobiose phosphorylase SdCBP were purified directly from the yeast strains being studied. Linear rates of catalysis were determined at a variety of cellobiose concentrations in triplicate, and kinetic parameters determined by non-linear regression. FIG. 12A depicts the kinetics of GH-1. FIG. 12B depicts the kinetics of SdCBP.

[0059] FIG. 13 depicts the effect of cellobiose on the activity of purified hexokinases. The three S. cerevisiae hexokinases Hxk1, Hxk2, and Glk1 were expressed and purified from E. coli. To determine the effect of cellobiose on hexokinase activity, linear rates of glucose-phosphorylating activity were determined in the presence (grey bars) or absence (black bars) of 184 mM cellobiose. Results are the mean+/−the standard deviation of triplicate measurements.

[0060] FIG. 14 depicts comparisons of the over-expression of the hexokinases HXK1, HXK2, and GLK1 for improved cellobiose fermentation capability with mutant cellodextrin transporter CDT-1 (F213L) via the phosphorolytic pathway. FIG. 14A depicts yeast cell density. FIG. 14B depicts cellobiose consumption. FIG. 14C depicts ethanol production.

[0061] FIG. 15 depicts the profile of cellobiose fermentation via the phosphorolytic pathway of an engineered yeast strain over-expressing the hexokinase HXK1 and the cellodextrin transporter mutant CDT-1 (F213L) when cultured at four different initial cell OD values. Cellobiose consumption (squares), ethanol production (diamonds), and yeast cell density (circles) were measured. FIG. 15A depicts an initial OD of 1.6. FIG. 15B depicts an initial OD of 7.5. FIG. 15C depicts an initial OD of 13.6. FIG. 15D depicts an initial OD of 23.1.

[0062] FIG. 16 depicts the linear relationship between initial cell OD and ethanol productivity via the phosphorolytic pathway when the hexokinase HXK1 is over-expressed with the mutant cellodextrin CDT-1 (F213L).

[0063] FIG. 17 depicts the crystal structure of the Cellvibrio gilvus cellobiose phosphorylase (PDB 2CQS). The identified motif is in dark grey.

[0064] FIG. 18 depicts growth curves of engineered S. cerevisiae strains grown on cellobiose, cellotriose, and cellotetraose. Symbols: S. cerevisiae D452-2 (), D452-SdCBP-CDT-1 (∇), D452-CDP_Acell-CDT-1 (▪), D452-CDP_Clent-CDT-1 (⋄), and D452-CDP_Ctherm-CDT-1 (▴). FIG. 18A depicts growth on cellobiose. FIG. 18B depicts growth on cellotriose. FIG. 18C depicts growth on cellotetraose.

[0065] FIG. 19 depicts growth curves of engineered S. cerevisiae strains grown on cellobiose, cellotriose, and cellotetraose. Symbols: S. cerevisiae D452-2 (), D452-SdCBP-CDT-1_F213L (∇), D452-CDP_Acell-CDT-1_F213L (▪), D452-CDP_Clent-CDT-1_F213L (⋄), and D452-CDP_Ctherm-CDT-1_F213L (▴). FIG. 19A depicts growth on cellobiose. FIG. 19B depicts growth on cellotriose. FIG. 19C depicts growth on cellotetraose.

[0066] FIG. 20 depicts the growth of cellobiose-utilizing S. cerevisiae strains containing single deletions of genes involved in sensing of extracellular sugar. FIG. 20 depicts growth on cellobiose and glucose of a wild-type cellobiose-utilizing S. cerevisiae strain (WT), a cellobiose-utilizing S. cerevisiae strain containing an Snf3 deletion (ΔSnf3), a cellobiose-utilizing S. cerevisiae strain containing an Rgt2 deletion (ΔRgt2), and a cellobiose-utilizing S. cerevisiae strain containing a Gpr1 deletion (ΔGpr1).

[0067] FIG. 21 depicts the growth of cellobiose-utilizing S. cerevisiae strains containing single deletions of genes involved in intracellular signaling pathways. FIG. 21A depicts growth on cellobiose and glucose of a wild-type cellobiose-utilizing S. cerevisiae strain (WT), a cellobiose-utilizing S. cerevisiae strain containing a Gpa2 deletion (ΔGpa2), and a cellobiose-utilizing S. cerevisiae strain containing a Ras2 deletion (ΔRas2). Gpa2 and Ras2 function in parallel to activate the cAMP-dependent Protein Kinase A (PKA) pathway. FIG. 21B depicts growth on cellobiose and glucose of a wild-type cellobiose-utilizing S. cerevisiae strain (WT), a cellobiose-utilizing S. cerevisiae strain containing a Ras2 deletion (ΔRas2), and a cellobiose-utilizing S. cerevisiae strain containing an Sch9 deletion (ΔSch9). Sch9 acts in parallel to the Ras/PKA pathway. FIG. 21C depicts growth on cellobiose and glucose of a wild-type cellobiose-utilizing S. cerevisiae strain (WT), and a cellobiose-utilizing S. cerevisiae strain containing a Yak1 deletion (ΔYak1). Yak1 is a protein kinase that works in parallel to the Ras/PKA pathway but inhibits rather than stimulates cell growth.

[0068] FIG. 22 depicts growth on cellobiose and glucose of a wild-type cellobiose-utilizing S. cerevisiae strain (WT), a cellobiose-utilizing S. cerevisiae strain containing a Gpa2 deletion (ΔGpa2), and a cellobiose-utilizing S. cerevisiae strain containing the Gpa2 G132V mutant [Gpa2 (G132V)].

[0069] FIG. 23A depicts growth on cellobiose and glucose of a wild-type cellobiose-utilizing S. cerevisiae strain (WT), and a cellobiose-utilizing S. cerevisiae strain containing an Hxk2 deletion (ΔKxk2). FIG. 23B depicts growth on cellobiose and glucose of a wild-type cellobiose-utilizing S. cerevisiae strain (WT), and a cellobiose-utilizing S. cerevisiae strain containing the Hxk2wrf mutant.

[0070] FIG. 24 depicts growth on cellobiose and glucose of a wild-type cellobiose-utilizing S. cerevisiae strain (WT), a cellobiose-utilizing S. cerevisiae strain containing a Rim15 deletion (ΔRim15), a cellobiose-utilizing S. cerevisiae strain containing an Stb3 deletion (ΔStb3), and a cellobiose-utilizing S. cerevisiae strain containing a Kcs1 deletion (ΔKcs1).

### DETAILED DESCRIPTION

### Overview

[0071] The present disclosure relates to host cells containing two or more of a recombinant cellodextrin transporter, a recombinant cellodextrin phosphorylase, a recombinant β-glucosidase, a recombinant phosphoglucomutase, or a recombinant hexokinase. Other aspects of the present disclosure relate to methods for degrading cellodextrin, by providing a host cell containing two or more of a recombinant cellodextrin transporter, a recombinant cellodextrin phosphorylase, a recombinant β-glucosidase, a recombinant phosphoglucomutase, or a recombinant hexokinase; and culturing the host cell in a medium containing cellodextrin or a source of cellodextrin, whereby cellodextrin degraded. Still other aspects of the present disclosure relate to methods for producing hydrocarbons or hydrocarbon derivatives from cellodextrin, by providing a host cell containing two or more of a recombinant cellodextrin transporter, a recombinant cellodextrin phosphorylase, a recombinant β-glucosidase, a recombinant phosphoglucomutase, or a recombinant hexokinase; and culturing the host cell in a medium containing cellodextrin or a source of cellodextrin, whereby the host cell produces hydrocarbons or hydrocarbon derivatives from the cellodextrin. Further aspects of the present disclosure relate to methods for reducing ATP consumption during glucose utilization, by providing a host cell containing a recombinant cellodextrin phosphorylase and one or more of a recombinant cellodextrin transporter, a recombinant phosphoglucomutase, or a recombinant hexokinase; and culturing the host cell in a medium containing cellodextrin or a source of cellodextrin, whereby cellodextrin is degraded by the recombinant cellodextrin phosphorylase to glucose-1-phosphate, where the production of glucose-1-phosphate from cellodextrin reduces ATP consumption as compared to a corresponding cell lacking the recombinant polypeptide.

[0072] Moreover, the present disclosure is based at least in part on a novel strategy for degrading cellodextrin to phosphorylated glucose by utilizing an S. cerevisiae strain that was engineered to express the Neurospora crassa cellodextrin transporter gene cdt-1 to transport cellodextrin into the cell; a cellobiose phosphorylase gene from Celvibrio gilvus, Sacharophagus degradans, or Clostridium thermocellum to degrade the transported cellodextrin to glucose-1-phosphate and glucose; a recombinant phosphoglucomutase to convert the glucose-1-phosphate to glucose-6-phosphate; and a recombinant hexokinase to convert the glucose produced by the degradation of cellodextrin to glucose-6-phosphate (FIG. 1).

### DEFINITIONS

[0073] Unless defined otherwise, all scientific and technical terms are understood to have the same meaning as commonly used in the art to which they pertain. For the purpose of the present disclosure, the following terms are defined.

[0074] As used herein, “cellodextrin” refers to a β(1→4) glucose polymers of varying length and includes, without limitation, cellobiose (2 glucose monomers), cellotriose (3 glucose monomers), cellotetraose (4 glucose monomers), cellopentaose (5 glucose monomers), and cellohexaose (6 glucose monomers).

[0075] As used herein, a “cellodextrin phosphorylase” refers to an enzyme that catalyzes the degradation of a cellodextrin by utilizing inorganic phosphate to cleave one or more β-glucosidic linkages between glucose moieties in the cellodextrin.

[0076] As used herein, a “cellodextrin transporter” refers to any sugar transport protein capable of transporting cellodextrins across the cell membrane of a cell.

[0077] As used herein, “sugar” refers to monosaccharides (e.g., glucose, fructose, galactose, xylose, arabinose), disaccharides (e.g., cellobiose, sucrose, lactose, maltose), and oligosaccharides (typically containing 3 to 10 component monosaccharides).

[0078] As used herein, the terms “polynucleotide,” “nucleic acid sequence,” “sequence of nucleic acids,” and variations thereof shall be generic to polydeoxyribonucleotides (containing 2-deoxy-D-ribose), to polyribonucleotides (containing D-ribose), to any other type of polynucleotide that is an N-glycoside of a purine or pyrimidine base, and to other polymers containing non-nucleotidic backbones, provided that the polymers contain nucleobases in a configuration that allows for base pairing and base stacking, as found in DNA and RNA. Thus, these terms include known types of nucleic acid sequence modifications, for example, substitution of one or more of the naturally occurring nucleotides with an analog; inter-nucleotide modifications, such as, for example, those with uncharged linkages (e.g., methyl phosphonates, phosphotriesters, phosphoramidates, carbamates, etc.), with negatively charged linkages (e.g., phosphorothioates, phosphorodithioates, etc.), and with positively charged linkages (e.g., aminoalkylphosphoramidates, aminoalkylphosphotriesters); those containing pendant moieties, such as, for example, proteins (including nucleases, toxins, antibodies, signal peptides, poly-L-lysine, etc.); those with intercalators (e.g., acridine, psoralen, etc.); and those containing chelators (e.g., metals, radioactive metals, boron, oxidative metals, etc.). As used herein, the symbols for nucleotides and polynucleotides are those recommended by the IUPAC-IUB Commission of Biochemical Nomenclature (Biochem. 9:4022, 1970).

[0079] As used herein, a “polypeptide” is an amino acid sequence containing a plurality of consecutive polymerized amino acid residues (e.g., at least about 15 consecutive polymerized amino acid residues, optionally at least about 30 consecutive polymerized amino acid residues, at least about 50 consecutive polymerized amino acid residues). In many instances, a polypeptide contains a polymerized amino acid residue sequence that is a transporter, an enzyme, a predicted protein of unknown function, or a domain or portion or fragment thereof. A transporter is involved in the movement of ions, small molecules, or macromolecules, such as a carbohydrate, across a biological membrane. An enzyme can catalyze a chemical reaction, such as the reduction of a carbohydrate to an alcohol, in a host cell. The polypeptide optionally contains modified amino acid residues, naturally occurring amino acid residues not encoded by a codon, and non-naturally occurring amino acid residues.

[0080] As used herein, “protein” refers to an amino acid sequence, oligopeptide, peptide, polypeptide, or portions thereof whether naturally occurring or synthetic.

[0081] Genes and proteins that may be used in the present disclosure include genes encoding conservatively modified variants and proteins that are conservatively modified variants of those genes and proteins described throughout the application. “Conservatively modified variants” as used herein include individual substitutions, deletions or additions to a polypeptide sequence which result in the substitution of an amino acid with a chemically similar amino acid. Conservative substitution tables providing functionally similar amino acids are well known in the art. Such conservatively modified variants are in addition to and do not exclude polymorphic variants, interspecies homologs, and alleles of the disclosure. The following eight groups contain amino acids that are conservative substitutions for one another: 1) Alanine (A), Glycine (G); 2) Aspartic acid (D), Glutamic acid (E); 3) Asparagine (N), Glutamine (Q); 4) Arginine (R), Lysine (K); 5) Isoleucine (I), Leucine (L), Methionine (M), Valine (V); 6) Phenylalanine (F), Tyrosine (Y), Tryptophan (W); 7) Serine (S), Threonine (T); and 8) Cysteine (C), Methionine (M) (see, e.g., Creighton, Proteins (1984)).

[0082] Homologs of the genes and proteins described herein may also be used in the present disclosure. As used herein, “homology” refers to sequence similarity between a reference sequence and at least a fragment of a second sequence. Homologs may be identified by any method known in the art, preferably, by using the BLAST tool to compare a reference sequence to a single second sequence or fragment of a sequence or to a database of sequences. As described below, BLAST will compare sequences based upon percent identity and similarity. As used herein, “orthology” refers to genes in different species that derive from a common ancestor gene.

[0083] The terms “identical” or percent “identity,” in the context of two or more nucleic acids or polypeptide sequences, refer to two or more sequences or subsequences that are the same. Two sequences are “substantially identical” if two sequences have a specified percentage of amino acid residues or nucleotides that are the same (i.e., 29% identity, optionally 30%, 40%, 45%, 50%, 55%, 60%, 65%, 70%, 75%, 80%, 85%, 90%, 95%, 99% or 100% identity over a specified region, or, when not specified, over the entire sequence), when compared and aligned for maximum correspondence over a comparison window, or designated region as measured using one of the following sequence comparison algorithms or by manual alignment and visual inspection. Optionally, the identity exists over a region that is at least about 50 nucleotides (or 10 amino acids) in length, or more preferably over a region that is 100 to 500 or 1000 or more nucleotides (or 20, 50, 200, or more amino acids) in length.

[0084] For sequence comparison, typically one sequence acts as a reference sequence, to which test sequences are compared. When using a sequence comparison algorithm, test and reference sequences are entered into a computer, subsequence coordinates are designated, if necessary, and sequence algorithm program parameters are designated. Default program parameters can be used, or alternative parameters can be designated. The sequence comparison algorithm then calculates the percent sequence identities for the test sequences relative to the reference sequence, based on the program parameters. When comparing two sequences for identity, it is not necessary that the sequences be contiguous, but any gap would carry with it a penalty that would reduce the overall percent identity. For blastn, the default parameters are Gap opening penalty=5 and Gap extension penalty=2. For blastp, the default parameters are Gap opening penalty=11 and Gap extension penalty=1.

[0085] A “comparison window,” as used herein, includes reference to a segment of any one of the number of contiguous positions including, but not limited to from 20 to 600, usually about 50 to about 200, more usually about 100 to about 150 in which a sequence may be compared to a reference sequence of the same number of contiguous positions after the two sequences are optimally aligned. Methods of alignment of sequences for comparison are well known in the art. Optimal alignment of sequences for comparison can be conducted, e.g., by the local homology algorithm of Smith and Waterman (1981), by the homology alignment algorithm of Needleman and Wunsch (1970) J Mol Biol 48(3):443-453, by the search for similarity method of Pearson and Lipman (1988) Proc Natl Acad Sci USA 85(8):2444-2448, by computerized implementations of these algorithms (GAP, BESTFIT, FASTA, and TFASTA in the Wisconsin Genetics Software Package, Genetics Computer Group, 575 Science Dr., Madison, Wis.), or by manual alignment and visual inspection [see, e.g., Brent et al., (2003) Current Protocols in Molecular Biology, John Wiley & Sons, Inc. (Ringbou Ed)].

[0086] Two examples of algorithms that are suitable for determining percent sequence identity and sequence similarity are the BLAST and BLAST 2.0 algorithms, which are described in Altschul et al. (1997) Nucleic Acids Res 25(17):3389-3402 and Altschul et al. (1990) J. Mol. Biol 215(3)-403-410, respectively. Software for performing BLAST analyses is publicly available through the National Center for Biotechnology Information. This algorithm involves first identifying high scoring sequence pairs (HSPs) by identifying short words of length W in the query sequence, which either match or satisfy some positive-valued threshold score T when aligned with a word of the same length in a database sequence. T is referred to as the neighborhood word score threshold (Altschul et al., supra). These initial neighborhood word hits act as seeds for initiating searches to find longer HSPs containing them. The word hits are extended in both directions along each sequence for as far as the cumulative alignment score can be increased. Cumulative scores are calculated using, for nucleotide sequences, the parameters M (reward score for a pair of matching residues; always >0) and N (penalty score for mismatching residues; always <0). For amino acid sequences, a scoring matrix is used to calculate the cumulative score. Extension of the word hits in each direction are halted when: the cumulative alignment score falls off by the quantity X from its maximum achieved value; the cumulative score goes to zero or below, due to the accumulation of one or more negative-scoring residue alignments; or the end of either sequence is reached. The BLAST algorithm parameters W, T, and X determine the sensitivity and speed of the alignment. The BLASTN program (for nucleotide sequences) uses as defaults a wordlength (W) of 11, an expectation (E) or 10, M=5, N=−4, and a comparison of both strands. For amino acid sequences, the BLASTP program uses as defaults a wordlength of 3, and expectation (E) of 10, and the BLOSUM62 scoring matrix [see Henikoff and Henikoff, (1992) Proc Natl Acad Sci USA 89(22):10915-10919] alignments (B) of 50, expectation (E) of 10, M=5, N=−4, and a comparison of both strands.

[0087] The BLAST algorithm also performs a statistical analysis of the similarity between two sequences (see, e.g., Karlin and Altschul, (1993) Proc Natl Acad Sci USA 90(12):5873-5877). One measure of similarity provided by the BLAST algorithm is the smallest sum probability (P(N)), which provides an indication of the probability by which a match between two nucleotide or amino acid sequences would occur by chance. For example, a nucleic acid is considered similar to a reference sequence if the smallest sum probability in a comparison of the test nucleic acid to the reference nucleic acid is less than about 0.2, more preferably less than about 0.01, and most preferably less than about 0.001.

[0088] Other than percentage of sequence identity noted above, another indication that two nucleic acid sequences or polypeptides are substantially identical is that the polypeptide encoded by the first nucleic acid is immunologically cross-reactive with the antibodies raised against the polypeptide encoded by the second nucleic acid. Thus, a polypeptide is typically substantially identical to a second polypeptide, for example, where the two peptides differ only by conservative substitutions. Another indication that two nucleic acid sequences are substantially identical is that the two molecules or their complements hybridize to each other under stringent conditions. Yet another indication that two nucleic acid sequences are substantially identical is that the same primers can be used to amplify the sequence.

### Host Cells of the Present Disclosure

[0089] Certain aspects of the present disclosure relate to host cells containing one or more of a recombinant cellodextrin transporter, a recombinant cellodextrin phosphorylase, a recombinant β-glucosidase, a recombinant phosphoglucomutase, or a recombinant hexokinase. Such host cells may be used to degrade cellodextrin, to produce hydrocarbons or hydrocarbon derivatives from cellodextrin, or to reducing ATP consumption during glucose utilization.

[0090] “Host cell” and “host microorganism” are used interchangeably herein to refer to a living biological cell that can be transformed via insertion of recombinant DNA or RNA. Such recombinant DNA or RNA can be in an expression vector. Thus, a host organism or cell as described herein may be a prokaryotic organism (e.g., an organism of the kingdom Eubacteria) or a eukaryotic cell. As will be appreciated by one of ordinary skill in the art, a prokaryotic cell lacks a membrane-bound nucleus, while a eukaryotic cell has a membrane-bound nucleus.

[0091] Any prokaryotic or eukaryotic host cell may be used in the present disclosure so long as it remains viable after being transformed with a sequence of nucleic acids. Preferably, the host cell is not adversely affected by the transduction of the necessary nucleic acid sequences, the subsequent expression of the proteins or the resulting intermediates. Suitable eukaryotic cells include, without limitation, fungal, plant, insect and mammalian cells.

[0092] In preferred embodiments, the host cell is a fungal cell. “Fungi” as used herein includes the phyla Ascomycota, Basidiomycota, Chytridiomycota, and Zygomycota (as defined by Hawksworth et al., In, Ainsworth and Bisby's Dictionary of The Fungi, 8th edition, 1995, CAB International, University Press, Cambridge, UK) as well as the Oomycota (as cited in Hawksworth et al., 1995, supra, page 171) and all mitosporic fungi (Hawksworth et al., 1995, supra).

[0093] In certain embodiments, the fungal cell is a yeast cell. “Yeast” as used herein includes ascosporogenous yeast (Endomycetales), basidiosporogenous yeast, and yeast belonging to the Fungi Imperfecti (Blastomycetes). Since the classification of yeast may change in the future, for the purposes of the present disclosure, yeast shall be defined as described in Biology and Activities of Yeast (Skinner, F. A., Passmore, S. M., and Davenport, R. R., eds, Soc. App. Bacteriol. Symposium Series No. 9, 1980).

[0094] In some embodiments, the yeast host is a Candida, Hansenula, Issatchenkia, Kluyveromyces, Pichia, Saccharomyces, Schizosaccharomyces, or Yarrowia strain. In other embodiments, the yeast host is a Saccharomyces carlsbergensis (Todkar, 2010), Saccharomyces cerevisiae (Duarte et al., 2009), Saccharomyces diastaticus, Saccharomyces douglasii, Saccharomyces kluyveri, Saccharomyces norbensis, Saccharomyces monacensis (GB-Analysts Reports, 2008), Saccharomyces bayanus (Kristen Publicover, 2010), Saccharomyces pastorianus (Nakao et al., 2007), Saccharomyces pombe (Mousdale, 2008), or Saccharomyces oviformis strain. In yet other embodiments, the yeast host is Kluyveromyces lactis (O. W. Merten, 2001), Kluyveromyces fragilis (Pestal et al., 2006; Siso, 1996), Kluyveromyces marxiamus (K. Kourkoutas et al., 2008), Pichia stipitis (Almeida et al., 2008), Candida shehatae (Ayhan Demirbas, 2003), or Candida tropicalis (Jamai et al., 2006). In other embodiments, the yeast host may be Yarrowia lipolytica (Biryukova E. N., 2009), Brettanomyces custersii (Spindler D. D. et al., 1992), or Zygosaccharomyces roux (Chaabane et al., 2006). In one preferred embodiment, the yeast cell is S. cerevisiae.

[0095] In other embodiments, the fungal host is a filamentous fungal strain. “Filamentous fungi” include all filamentous forms of the subdivision Eumycota and Oomycota (as defined by Hawksworth et al., 1995, supra). The filamentous fungi are generally characterized by a mycelial wall composed of chitin, cellulose, glucan, chitosan, mannan, and other complex polysaccharides. Vegetative growth is by hyphal elongation and carbon catabolism is obligately aerobic. In contrast, vegetative growth by yeasts such as Saccharomyces cerevisiae is by budding of a unicellular thallus and carbon catabolism may be fermentative.

[0096] In some embodiments, the filamentous fungal host is, without limitation, an Acremonium, Aspergillus, Fusarium, Humicola, Mucor, Myceliophthora, Neurospora, Penicillium, Scytalidium, Thielavia, Tolypocladium, or Trichoderma strain.

[0097] In other embodiments, the filamentous fungal host is an Aspergillus awamori, Aspergillus foetidus, Aspergillus japonicus, Aspergillus nidulans, Aspergillus niger, or Aspergillus oryzae strain. In still other embodiments, the filamentous fungal host is a Fusarium bactridioides, Fusarium cerealis, Fusarium crookwellense, Fusarium culmorum, Fusarium graminearum, Fusarium graminum, Fusarium heterosporum, Fusarium negundi, Fusarium oxysporum, Fusarium reticulatum, Fusarium roseum, Fusarium sambucinum, Fusarium sarcochroum, Fusarium sporotrichioides, Fusarium sulphureum, Fusarium torulosum, Fusarium trichothecioides, or Fusarium venenatum strain. In yet other embodiments, the filamentous fungal host is a Humicola insolens, Humicola lanuginosa, Mucor miehei, Myceliophthora thermophila, Neurospora crassa, Penicillium purpurogenum, Scytalidium thermophilum, Sporotrichum thermophile (Topakas et al., 2003), or Thielavia terrestris strain. In a further embodiment, the filamentous fungal host is a Trichoderma harzianum, Trichoderma koningii, Trichoderma longibrachiatum, Trichoderma reesei, or Trichoderma viride strain.

[0098] In other embodiments, the host cell is prokaryotic, and in certain embodiments, the prokaryotes are E. coli (Dien, B. S. et al., 2003; Yomano, L. P. et al., 1998; Moniruzzaman et al., 1996), Bacillus subtilis (Susana Romero et al., 2007), Zymomonas mobilis (B. S. Dien et al., 2003; Weuster Botz, 1993; Alterthum and Ingram, 1989), Thermoanaerobacterium saccharolyticum (Marietta Smith, 2009), or Klebsiella oxytoca (Dien, B. S. et al., 2003; Zhou et al., 2001; Brooks and Ingram, 1995). In other embodiments, the prokaryotic host cells are Carboxydocella sp. (Dominik et al., 2007), Corynebacterium glutamicum (Masayuki Inui, et al., 2004), Enterobacteriaceae (Ingram et al., 1995), Erwinia chrysanthemi (Zhou and Ingram, 2000; Zhou et al., 2001), Lactobacillus sp. (McCaskey, T. A., et al., 1994), Pediococcus acidilactici (Zhou, S. et al., 2003), Rhodopseudomonas capsulata (X. Y. Shi et al., 2004), Streptococcus lactis (J. C. Tang et al., 1988), Vibrio furnissii (L. P. Wackett, 2010), Vibrio furnissii M1 (Park et al., 2001), Caldicellulosiruptor saccharolyticus (Z. Kadar et al., 2004), or Xanthomonas campestris (S. T. Yang et al., 1987). In other embodiments, the host cells are cyanobacteria. Additional examples of bacterial host cells include, without limitation, those species assigned to the Escherichia, Enterobacter, Azotobacter, Erwinia, Bacillus, Pseudomonas, Klebsiella, Proteus, Salmonella, Serratia, Shigella, Rhizobia, Vitreoscilla, Synechococcus, Synechocystis, and Paracoccus taxonomical classes.

[0099] The host cells of the present disclosure may be genetically modified in that recombinant nucleic acids have been introduced into the host cells, and as such the genetically modified host cells do not occur in nature. A suitable host cell of the present disclosure is one capable of expressing one or more nucleic acid constructs encoding one or more proteins for different functions.

[0100] “Recombinant nucleic acid” or “heterologous nucleic acid” or “recombinant polynucleotide” as used herein refers to a polymer of nucleic acids where at least one of the following is true: (a) the sequence of nucleic acids is foreign to (i.e., not naturally found in) a given host cell; (b) the sequence may be naturally found in a given host cell, but in an unnatural (e.g., greater than expected) amount; or (c) the sequence of nucleic acids contains two or more subsequences that are not found in the same relationship to each other in nature. For example, regarding instance (c), a recombinant nucleic acid sequence will have two or more sequences from unrelated genes arranged to make a new functional nucleic acid. Specifically, the present disclosure describes the introduction of an expression vector into a host cell, where the expression vector contains a nucleic acid sequence coding for a protein that is not normally found in a host cell or contains a nucleic acid coding for a protein that is normally found in a cell but is under the control of different regulatory sequences. With reference to the host cell's genome, then, the nucleic acid sequence that codes for the protein is recombinant. A protein that is referred to as recombinant generally implies that it is encoded by a recombinant nucleic acid sequence in the host cell.

[0101] A “recombinant” polypeptide, protein, or enzyme of the present disclosure, is a polypeptide, protein, or enzyme that is encoded by a “recombinant nucleic acid” or “heterologous nucleic acid” or “recombinant polynucleotide.”

[0102] In some embodiments, the genes encoding the desired proteins in the host cell may be heterologous to the host cell or these genes may be endogenous to the host cell but are operatively linked to heterologous promoters and/or control regions which result in the higher expression of the gene(s) in the host cell. In certain embodiments, the host cell does not naturally produce the desired proteins, and contains heterologous nucleic acid constructs capable of expressing one or more genes necessary for producing those molecules.

[0103] “Endogenous” as used herein with reference to a nucleic acid molecule or polypeptide and a particular cell or microorganism refers to a nucleic acid sequence or polypeptide that is in the cell and was not introduced into the cell using recombinant engineering techniques; for example, a gene that was present in the cell when the cell was originally isolated from nature.

[0104] “Genetically engineered” or “genetically modified” refers to any recombinant DNA or RNA method used to create a prokaryotic or eukaryotic host cell that expresses a protein at elevated levels, at lowered levels, or in a mutated form. In other words, the host cell has been transfected, transformed, or transduced with a recombinant polynucleotide molecule, and thereby been altered so as to cause the cell to alter expression of a desired protein. Methods and vectors for genetically engineering host cells are well known in the art; for example various techniques are illustrated in Current Protocols in Molecular Biology, Ausubel et al., eds. (Wiley & Sons, New York, 1988, and quarterly updates). Genetically engineering techniques include, without limitation, expression vectors, and targeted homologous recombination and gene activation (see, for example, U.S. Pat. No. 5,272,071).

[0105] Cellodextrin Transporters

[0106] Certain aspects of the present disclosure relate to host cells that contain a recombinant cellodextrin transporter. A cellodextrin transporter is any transmembrane protein that transports a cellodextrin molecule from outside of the cell to the inside of the cell and/or from inside of the cell to outside of the cell. In certain embodiments, the cellodextrin transporter is a functional fragment that maintains the ability to transport a cellodextrin molecule from outside of the cell to the inside of the cell and/or from inside of the cell to outside of the cell.

[0107] Recombinant cellodextrin transporters of the present disclosure may be encoded by any of the genes listed in Table 10, in Supplemental Data, Dataset S1, and page 3 in Tian et al., 2009; and in Tables 1 and 2.

TABLE 1
Listing of sequences encoding cellodextrin transporters.

| | Alter- | NCBI Reference | |
|---|---|---|---|
| Gene | nate | Sequence/GenBank | |
| Name/Locus | Name | Accession Number | Organism |
| NCU00801 | cbt1 | XP_963801.1/EAA34565 | N. crassa |
| NCU00809 | | XP_964302.1/EAA35116.1 | N. crassa |
| NCU00821 | AN25 | XP_964364.2/EAA35128.2 | N. crassa |
| NCU00988 | Xy33 | XP_963898.1/EAA34662.1 | N. crassa |
| NCU01231 | | XP_961597.2/EAA32361.2 | N. crassa |
| NCU01494 | AN49 | XP_955927.2/EAA26691.2 | N. crassa |
| NCU02188 | AN28-3 | XP_959582.2/EAA30346.2 | N. crassa |
| NCU04537 | Xy50 | XP_955977.1/EAA26741.1 | N. crassa |
| NCU04963 | AN29-2 | XP_959411.2/EAA30175.2 | N. crassa |
| NCU05519 | | XP_960481.1/EAA31245.1 | N. crassa |
| NCU05853 | | XP_959844.1/EAA30608.1 | N. crassa |
| NCU05897 | | XP_959888.1/EAA30652.1 | N. crassa |
| NCU06138 | Xy31 | XP_960000.1/EAA30764.1 | N. crassa |
| NCU08114 | cbt2 | XP_963873.1/EAA34637.1 | N. crassa |
| NCU09287 | AN41 | XP_958139.1/EAA28903.1 | N. crassa |
| NCU10021 | | XP_958069.2/EAA28833.2 | N. crassa |
| XP_001387242 | Ap26 | XP_001387242 | P. stipitis |
| HGT3 | Xyp30- | XP_001386715.1/ABN68686.1 | P. stipitis |
| | 1 | | |
| STL1 | Xyp30 | XP_001383774.1/ABN65745.1 | P. stipitis |
| STL12/XUT6 | Xyp29 | XP_001386589.1/ABN68560.1 | P. stipitis |
| SUT2 | Ap31 | XP_001384295.2/ABN66266.2 | P. stipitis |
| SUT3 | Xyp37 | XP_001386019.2/ABN67990.2 | P. stipitis |
| XUT1 | Xyp32 | XP_001385583.1/ABN67554.1 | P. stipitis |
| XUT2 | Xyp31 | XP_001387242.1/EAZ63219.2 | P. stipitis |
| XUT3 | Xyp33 | XP_001387138.1/EAZ63115.1 | P. stipitis |
| XUT7 | Xyp28 | XP_001387067.1/EAZ63044.1 | P. stipitis |
| NCU07705 | cdr-1 | XP_962291.1/EAA33055 | N. crassa |
| NCU05137 | | XP_956635.1/EAA27399 | N. crassa |
| NCU01517 | | XP_956966.1/EAA27730 | N. crassa |
| NCU09133 | | XP_958905.1/EAA29669 | N. crassa |
| NCU10040 | | | N. crassa |

TABLE 2
Listing of cellodextrin transporter orthologs.

| | | NCBI Reference |
|---|---|---|
| | | Sequence/NCBI |
| N. crassa | | GI Number/ |
| ortholog | Organism | JGI number ¥ |
| NCU00809 | Chaetomium globusom CBS148.51 | XP_001220480 |
| NCU00809 | Podospora anserina | XP_001912722 |
| NCU00809 | Nectria haematococca mpVI77-13-4 | EEU41662 |
| NCU00809 | Aspergillus nidulans FGSC A4 | XP_660803 |
| NCU00809 | Aspergillus terreus NIH2624 | XP_001218592 |
| NCU00809 | Talaromyces stipitatus ATCC 10500 | XP_002341594 |
| NCU00809 | Aspergillus niger | XP_001395979 |
| NCU00809 | Aspergillus fumigatus Af293 | XP_747891 |
| NCU00809 | Aspergillus terreus NIH2624 | XP_00120996 |
| NCU00809 | Aspergillus oryzae RIB40 | XP_001817400 |
| NCU08114 | Podospora anserina | XP_001908539 |
| NCU08114 | Penicillium chrysogenum Wisconsin | XP_002568019 |
| | 54-1255 | |
| NCU08114 | Aspergillus terreus NIH2624 | XP_001209810 |
| NCU08114 | Aspergillus oryzae RIB40 | XP_001820343 |
| NCU08114 | Aspergillus terreus NIH2624 | XP_001210859 |
| NCU08114 | Neurospora crassa OR74A | XP_001728155 |
| NCU08114 | Aspergillus oryzae RIB40 | XP_001826848 |
| NCU08114 | Aspergillus nidulans FGSC A4 | XP_657617 |
| NCU08114 | Talaromyces stipitatus ATCC 10500 | XP_002487579 |
| NCU08114 | Chaetomium globosum CBS 148.51 | XP_001227497 |
| NCU08114 | Trichoderma atroviridae | 215408 |
| NCU08114 | Chaetomium globosum | XP_001220290.1 |
| NCU08114 | Aspergillus nidulans | ANID_08347 |
| NCU08114 | Pleurotus ostreatus | 51322 |
| NCU08114 | Sporotrichum thermophile | 114107 |
| NCU00801 | Aspergillus nidulans | XP_660418.1 |
| NCU00801 | Magnaporthe grisea | XP_364883.1 |
| NCU00801 | Aspergillus fumigatus | XP_753099.1 |
| NCU00801 | Trichoderma atroviridae | 211304 |
| NCU00801 | Chaetomium globosum | XP_001220469.1 |
| NCU00801 | Tremella mesenterica | 63529 |
| NCU00801 | Heterobasidion. annosum | 105952 |
| NCU00801 | Cryphonectria parasitica | 252427 |
| NCU00801 | Trichoderma ressei | 67752 |
| NCU00801 | Aspergillus clavatus | XP_001268541.1 |
| NCU00801 | Neurospora discreta | 77429 |
| NCU00801 | Trichoderma reesei | 3405 |
| NCU00801 | Sporotrichum thermophile | 43941 |
| NCU00801 | Neurospora crassa | XP_963801.1 |
| NCU05853 | Chaetomium globosum | XP_001226269.1 |
| NCU05853 | Trichoderma reesei | 46819 |
| NCU05853 | Mycosphaerella graminicola | 68287 |
| NCU05853 | Aspergillus flavus | AFLA_000820A |
| NCU00809 | Pichia stipitis CBS6054 | XP_001383110.1/ |
| | | GI:126133170 |
| NCU00809 | Pichia stipitis CBS6054 | XP_001387231.1/ |
| | | GI:126276337 |
| NCU00809 | Pichia stipitis CBS6054 | XP_001383677.2/ |
| | | GI:150864727 |
| NCU08114 | Pichia stipitis CBS6054 | XP_001386873.1/ |
| | | GI:126275571 |
| NCU05853 | Pichia stipitis CBS6054 | XP_001382754.1/ |
| | | GI:126132458 |
| NCU08114 | Pichia stipitis CBS6054 | XP_001387757.1/ |
| | | GI:126273939 |
| NCU08114 | Pichia stipitis CBS6054 | XP_001385684.1/ |
| | | GI:126138322 |
| NCU08114 | Pichia stipitis CBS6054 | XP_001384653.2/ |
| | | GI:15086543 |

¥ When accession numbers were not available, the JGI number was used. The JGI number allows access to the gene sequence via the JGI genome portal for this organism (accessible from the following page: genome.jgi-psf.org/programs/fungi/index.jsf). The A. flavus and A. nidulans identifiers allow access to the genes through their genome portals at webpage cadre-genomes.org.uk/and webpage broadinstitute.org/annotation/genome/aspergillus_group/MultiHome.html, respectively.

[0108] In other embodiments, a recombinant cellodextrin transporter of the present disclosure has about 20%, or at least about 29%, or at least about 30%, or at least about 40%, or at least about 50%, or at least about 55%, or at least about 60%, or at least about 65%, or at least about 70%, or at least about 75%, or at least about 80%, or at least about 85%, or at least about 90%, or at least about 92%, or at least about 94%, or at least about 96%, or at least about 98%, or at least about 99%, or at least about 100% amino acid residue sequence identity to a polypeptide encoded by any of the genes listed in genes listed in Table 10, in Supplemental Data, Dataset S1, page 3 in Tian et al., 2009; and in Tables 1 and 2.

[0109] Additionally, cellodextrin transporters of the present disclosure include, without limitation, NCU00801, NCU00809, NCU08114, XP_{—}001268541.1, LAC2, NCU00130, NCU00821, NCU04963, NCU07705, NCU05137, NCU01517, NCU09133, and NCU10040. In certain embodiments, the recombinant cellodextrin transporter has at least about 20%, or at least about 29%, or at least about 30%, or at least about 40%, or at least about 50%, or at least about 55%, or at least about 60%, or at least about 65%, or at least about 70%, or at least about 75%, or at least about 80%, or at least about 85%, or at least about 90%, or at least about 92%, or at least about 94%, or at least about 96%, or at least about 98%, or at least about 99%, or at least about 100% amino acid residue sequence identity to a polypeptide encoded by any of the sequences NCU00801, NCU00809, NCU08114, XP_{—}001268541.1, LAC2, NCU00130, NCU00821, NCU04963, NCU07705, NCU05137, NCU01517, NCU09133, or NCU10040.

[0110] In certain preferred embodiments, the host cell contains a cellodextrin transporter encoded by NCU00801, which is also known as CDT-1 or CBT1. In other preferred embodiments, the host cell contains a cellodextrin transporter encoded by NCU08114, which is also known as CDT-2 or CBT2. In certain some embodiments, the recombinant cellodextrin transporter has an amino acid sequence with at least 29%, at least 30%, at least 35%, at least 40%, at least 45%, at least 50%, at least 55%, at least 60%, at least 65%, at least 70%, at least 75%, at least 80%, at least 85%, at least 90%, at least 95%, at least 99%, or at least 100% amino acid identity to CDT-1 (SEQ ID NO: 9) or CDT-2 (SEQ ID: 10).

[0111] Suitable cellodextrin transporters of the present disclosure also include, without limitation, those described in U.S. Pat. Application Publication No. US 2011/0262983 and PCT Publication No. WO 2011/123715. For example, suitable cellodextrin transporters may include, without limitation, HXT2.1, HXT2.2, HXT2.3, HXT2.4, HXT2.5, HXT2.6, and HXT4. In certain embodiments, a recombinant cellodextrin transporter of the present disclosure has about 20%, or at least about 29%, or at least about 30%, or at least about 40%, or at least about 50%, or at least about 55%, or at least about 60%, or at least about 65%, or at least about 70%, or at least about 75%, or at least about 80%, or at least about 85%, or at least about 90%, or at least about 92%, or at least about 94%, or at least about 96%, or at least about 98%, or at least about 99%, or at least about 100% amino acid residue sequence identity to amino acid residue sequence identity to a polypeptide encoded by any of the genes listed in genes listed in U.S. Pat. Application Publication No. US 2011/0262983 and PCT Publication No. WO 2011/123715 (e.g., HXT2.1, HXT2.2, HXT2.3, HXT2.4, HXT2.5, HXT2.6, or HXT4).

[0112] Recombinant cellodextrin transporters of the present disclosure may also include, without limitation, polypeptides encoded by polynucleotides that encode conservatively modified variants of polypeptides encoded by the genes listed above. Recombinant cellodextrin transporters of the present disclosure further include polypeptides encoded by polynucleotides that encode homologs or orthologs of polypeptides encoded by any of the genes listed in Table 10, in Supplemental Data, Dataset S1, page 3 in Tian et al., 2009; in Tables 1 and 2, and in U.S. Pat. Application Publication No. US 2011/0262983 and PCT Publication No. WO 2011/123715.

[0113] Cellodextrin Transporter Sequence Motifs

[0114] As described herein, recombinant cellodextrin transporters of the present disclosure include members of the Major Facilitator Superfamily sugar transporter family, including, without limitation, NCU00988, NCU10021, NCU04963, NCU06138, NCU00801, NCU08114, and NCU05853. Members of the Major Facilitator Superfamily (MFS) (Transporter Classification #2.A. 1) of transporters almost always contain 12 transmembrane α-helices, with an intracellular N- and C-terminus (Pao et al., Microbiol Mol Biol Rev 62, 1, March 1998). While the primary sequence of MFS transporters varies widely, all are thought to share the tertiary structure of the E. coli lactose permease (LacY) (J. Abramson et al., Science 301, 610, 2003), and the E. coli Pi/glycerol-3-phospate (GlpT) (Huang et al., Science 301, 616, 2003). In these examples the six N- and C-terminal helices form two distinct domains connected by a long cytoplasmic loop between helices 6 and 7. This symmetry corresponds to a duplication event thought to have given rise to the MFS. Substrate binds within a hydrophilic cavity formed by helices 1, 2, 4, and 5 of the N-terminal domain, and helices 7, 8, 10, and 11 of the C-terminal domain. This cavity is stabilized by helices 3, 6, 9, and 12.

[0115] The Sugar Transporter family of the MFS (Transporter Classification #2.A.1.1) is defined by motifs found in transmembrane helices 6 and 12 (PESPR (SEQ ID NO: 231)/PETK (SEQ ID NO: 232)), and loops 2 and 8 (GRR/GRK) (M. C. Maiden, E. O. Davis, S. A. Baldwin, D. C. Moore, P. J. Henderson, Nature 325, 641 (Feb. 12-18, 1987)). The entire Hidden Markov Model (HMM) for this family can be viewed at pfam.janelia.org/family/PF00083#tabview=tab3. PROSITE (N. Hulo et al., Nucleic Acids Res 34, D227 (Jan. 1, 2006)) uses two motifs to identify members of this family. The first is [LIVMSTAG]-[LIVMFSAG]-{SH}-{RDE}-[LIVMSA]-[DE]-{TD}-[LIVMFYWA]-G-R-[RK]-x(4,6)-[GSTA] (SEQ ID NO: 198). The second is [LIVMF]-x-G-[LIVMFA]-{V}-x-G-{KP}-x(7)-[LIFY]-x(2)-[EQ]-x(6)-[RK] (SEQ ID NO: 199). As an example of how to read a PROSITE motif, the following motif, [AC]-x-V-x(4)-{ED}(SEQ ID NO: 200), is translated as: [Ala or Cys]-any-Val-any-any-any-any-{any but Glu or Asp}(SEQ ID NO: 200).

[0116] Multiple sequence alignments produced in T-COFFEE between putative cellodextrin transporter orthologs and confirmed cellodextrin transporters identified conserved motifs. The conserved motifs were defined using PROSITE notation. As an example of how to read a PROSITE motif, the following motif, [AC]-x-V-x(4)-{ED}(SEQ ID NO: 200), is translated as: [Ala or Cys]-any-Val-any-any-any-any-{any but Glu or Asp}(SEQ ID NO: 200). Transmembrane helix 1 contains the motif, [LIVM]-Y-[FL]-x(13)-[YF]-D (SEQ ID NO: 1). Transmembrane helix 2 contains the motif, [YF]-x(2)-G-x(5)-[PVF]-x(6)-[DQ] (SEQ ID NO: 2). The loop connecting transmembrane helix 2 and transmembrane helix 3 contains the motif, G-R-[RK] (SEQ ID NO: 3). Transmembrane helix 5 contains the motif, R-x(6)-[YF]-N (SEQ ID NO: 4). Transmembrane helix 6 contains the motif, WR-[IVLA]-P-x(3)-Q (SEQ ID NO: 5). The sequence between transmembrane helix 6 and transmembrane helix 7 contains the motif, P-E-S-P-R-x-L-x(8)-A-x(3)-L-x(2)-Y-H (SEQ ID NO: 6). Transmembrane helix 7 contains the motif, F-[GST]-Q-x-S-G-N-x-[LIV] (SEQ ID NO: 7). Transmembrane helix 10 and transmembrane helix 11 and the sequence between them contains the motif, L-x(3)-[YIV]-x(2)-E-x-L-x(4)-R-[GA]-K-G (SEQ ID NO: 8).

[0117] Accordingly, certain aspects of the present disclosure relate to recombinant cellodextrin transporters, or functional fragments thereof, that contain one or more of the disclosed conserved motifs. In certain embodiments, the recombinant cellodextrin transporter, or functional fragment thereof, includes a polypeptide containing transmembrane α-helix 1, α-helix 2, α-helix 3, α-helix 4, α-helix 5, α-helix 6, α-helix 7, α-helix 8, α-helix 9, α-helix 10, α-helix 11, α-helix 12, and transmembrane α-helix 1 contains SEQ ID NO: 1. In other embodiments, the recombinant cellodextrin transporter includes a polypeptide containing transmembrane α-helix 1, α-helix 2, α-helix 3, α-helix 4, α-helix 5, α-helix 6, α-helix 7, α-helix 8, α-helix 9, α-helix 10, α-helix 11, α-helix 12, and transmembrane α-helix 2 contains SEQ ID NO: 2. In still other embodiments, the recombinant cellodextrin transporter includes a polypeptide containing transmembrane α-helix 1, α-helix 2, α-helix 3, α-helix 4, α-helix 5, α-helix 6, α-helix 7, α-helix 8, α-helix 9, α-helix 10, α-helix 11, α-helix 12, and a loop connecting transmembrane α-helix 2 and transmembrane α-helix 3 contains SEQ ID NO: 3. In yet other embodiments, the recombinant cellodextrin transporter includes a polypeptide containing transmembrane α-helix 1, α-helix 2, α-helix 3, α-helix 4, α-helix 5, α-helix 6, α-helix 7, α-helix 8, α-helix 9, α-helix 10, α-helix 11, α-helix 12, and transmembrane α-helix 5 contains SEQ ID NO: 4. In other embodiments, the recombinant cellodextrin transporter includes a polypeptide containing transmembrane α-helix 1, α-helix 2, α-helix 3, α-helix 4, α-helix 5, α-helix 6, α-helix 7, α-helix 8, α-helix 9, α-helix 10, α-helix 11, α-helix 12, and transmembrane α-helix 6 contains SEQ ID NO: 5. In still other embodiments, the recombinant cellodextrin transporter includes a polypeptide containing transmembrane α-helix 1, α-helix 2, α-helix 3, α-helix 4, α-helix 5, α-helix 6, α-helix 7, α-helix 8, α-helix 9, α-helix 10, α-helix 11, α-helix 12, and sequence between transmembrane α-helix 6 and transmembrane α-helix 7 contains SEQ ID NO: 6. In yet other embodiments, the recombinant cellodextrin transporter includes a polypeptide containing transmembrane α-helix 1, α-helix 2, α-helix 3, α-helix 4, α-helix 5, α-helix 6, α-helix 7, α-helix 8, α-helix 9, α-helix 10, α-helix 11, α-helix 12, and transmembrane α-helix 7 contains SEQ ID NO: 7. In other embodiments, the recombinant cellodextrin transporter includes a polypeptide containing transmembrane α-helix 1, α-helix 2, α-helix 3, α-helix 4, α-helix 5, α-helix 6, α-helix 7, α-helix 8, α-helix 9, α-helix 10, α-helix 11, α-helix 12, and transmembrane α-helix 10 and transmembrane α-helix 11 and the sequence between them contain SEQ ID NO: 8.

[0118] Moreover, each of the above described embodiments may be combined in any number of combinations. A recombinant cellodextrin transporter according to any of the above embodiments may include a polypeptide containing 1, 2, 3, 4, 5, 6, or 7 of any of SEQ ID NOs: 1-8, or the polypeptide may contain all of SEQ ID NOs: 1-8. For example, a recombinant cellodextrin transporter may include a polypeptide containing transmembrane α-helix 1, α-helix 2, α-helix 3, α-helix 4, α-helix 5, α-helix 6, α-helix 7, α-helix 8, α-helix 9, α-helix 10, α-helix 11, α-helix 12, where transmembrane α-helix 1 contains SEQ ID NO: 1, a loop connecting transmembrane α-helix 2 and transmembrane α-helix 3 contains SEQ ID NO: 3, and transmembrane α-helix 7 contains SEQ ID NO: 7. Or, in another example, a recombinant cellodextrin transporter may include a polypeptide containing transmembrane α-helix 1, α-helix 2, α-helix 3, α-helix 4, α-helix 5, α-helix 6, α-helix 7, α-helix 8, α-helix 9, α-helix 10, α-helix 11, α-helix 12, where transmembrane α-helix 2 contains SEQ ID NO: 2, transmembrane α-helix 3 contains SEQ ID NO: 3, transmembrane α-helix 6 contains SEQ ID NO: 5, and transmembrane α-helix 10 and transmembrane α-helix 11 and the sequence between them contain SEQ ID NO: 8.

[0119] Mutant Cellodextrin Transporters

[0120] Other aspects of the present disclosure relate to mutant cellodextrin transporters that may be used to increase the function and/or activity of a cellodextrin transporter of the present disclosure. Mutant cellodextrin transporters may be produced by mutating a polynucleotide encoding a cellodextrin transporter of the present disclosure. In some embodiments, a mutant cellodextrin transporter of the present disclosure may contain at least one mutation that includes, without limitation, a point mutation, a missense mutation, a substitution mutation, a frameshift mutation, an insertion mutation, a duplication mutation, an amplification mutation, a translocation mutation, or an inversion mutation that results in a cellodextrin transporter with increased function and/or activity.

[0121] Methods of generating at least one mutation in a cellodextrin transporter of interest are well known in the art and include, without limitation, random mutagenesis and screening, site-directed mutagenesis, PCR mutagenesis, insertional mutagenesis, chemical mutagenesis, and irradiation.

[0122] In some embodiments, the mutant cellodextrin transporter contains one or more amino acid substitutions. For example, a cellodextrin transporter of the present disclosure may contain an amino acid substitution at one or more positions corresponding to positions of the amino acid sequence of CDT-1 (SEQ ID NO: 9). Suitable one or more positions include, without limitation, a position corresponding to amino acid 91 of SEQ ID NO: 9, a position corresponding to amino acid 104 of SEQ ID NO: 9, a position corresponding to amino acid 170 of SEQ ID NO: 9, a position corresponding to amino acid 174 of SEQ ID NO: 9, a position corresponding to amino acid 194 of SEQ ID NO: 9, a position corresponding to amino acid 213 of SEQ ID NO: 9, a position corresponding to amino acid 335 of SEQ ID NO: 9, and combinations thereof.

[0123] In one non-limiting example, the amino acid substitution at one or more positions are a glycine (G) to alanine (A) substitution at a position corresponding to amino acid 91 of SEQ ID NO: 9; a glutamine (Q) to alanine (A) substitution at a position corresponding to amino acid 104 of SEQ ID NO: 9; a phenylalanie (F) to alanine (A) substitution at a position corresponding to amino acid 170 of SEQ ID NO: 9; an arginine (R) to alanine (A) substitution at a position corresponding to amino acid 174 of SEQ ID NO: 9; a glutamate (E) to alanine (A) substitution at a position corresponding to amino acid 194 of SEQ ID NO: 9; a phenylalanie (F) to lysine (L) substitution at a position corresponding to amino acid 213 of SEQ ID NO: 9; a phenylalanie (F) to alanine (A) substitution at a position corresponding to amino acid 335 of SEQ ID NO: 9; or combinations thereof. In certain preferred embodiments, the amino acid substitution at one or more positions is a glycine (G) to alanine (A) substitution at a position corresponding to amino acid 91 of SEQ ID NO: 9 and/or a phenylalanie (F) to lysine (L) substitution at a position corresponding to amino acid 213 of SEQ ID NO: 9.

[0124] In some embodiments, the increased function and/or activity of a mutant cellodextrin transporter results in a host cell that consumes cellodextrin at a rate faster than the rate of cellodextrin consumption in a cell lacking the mutant cellodextrin transporter. For example, the rate of cellodextrin consumption in a host cell containing a mutant cellodextrin transporter may be at least 5%, at least 10%, at least 15%, at least 20%, at least 25%, at least 30%, at least 35%, at least 40%, at least 45%, at least 50%, at least 55%, at least 60%, at least 65%, at least 70%, at least 75%, at least 80%, at least 85%, at least 90%, at least 95%, at least 100%, at least 125%, at least 150%, at least 175%, at least 200%, at least 225%, at least 250%, at least 275%, at least 300%, or at least a higher percentage faster than the rate of cellodextrin consumption in a host cell containing a corresponding wild-type cellodextrin transporter.

[0125] Combinations with Cellodextrin Transporters

[0126] Further aspects of the present disclosure relate to host cells that contain at least one recombinant cellodextrin transporter of the present disclosure in combination with one or more of a recombinant cellodextrin phosphorylase of the present disclosure, a recombinant r-glucosidase of the present disclosure, a recombinant phosphoglucomutase of the present disclosure, and a recombinant hexokinase of the present disclosure.

[0127] Generally, once a cellodextrin transporter of the present disclosure transports cellodextrins, such as cellobiose, into the cell, the cell must degrade the cellodextrins. However, in certain embodiments, host cells of the present disclosure, such as yeast cells, do not naturally contain the enzymes necessary to degrade the cellodextrins into less complex saccharides that can be utilized by the cell. Accordingly, the host cell can be engineered to express a recombinant cellodextrin phosphorylase and/or a recombinant β-glucosidase in order to degrade the cellodextrins. Thus, in certain embodiments, a host cell of the present disclosure expresses at least one recombinant cellodextrin transporter in combination with at least one recombinant cellodextrin phosphorylase and/or at least one recombinant β-glucosidase. Moreover, under different stress conditions, it can be beneficial to express both a recombinant cellodextrin phosphorylase and a recombinant β-glucosidase in cells containing a cellodextrin transporter. Additionally, such host cells can be engineered to optimize the cellodextrin phosphorylase pathway and β-glucosidase pathway under different stress conditions. Accordingly, in certain embodiments, a host cell of the present disclosure containing a cellodextrin transporter also expresses at least one recombinant cellodextrin phosphorylase and at least one recombinant β-glucosidase.

[0128] In some embodiments, host cells containing a cellodextrin transporter are capable of phosphorolytically cleaving cellodextrin to glucose-1-phosphate and a shorter-chain cellodextrin. In order for the cell to utilize the produced glucose-1-phosphate, it needs to be converted to glucose-6-phosphate in order to enter the cell's glycolytic pathway. Glucose-1-phosphate can be converted to glucose-6-phosphate by phosphoglucomutases that are naturally expressed in the host cell. However, phosphoglucomutases can be transcriptionally downregulated during glycolytic growth. Moreover, the expression of other recombinant proteins or enzymes, or the growth conditions utilized may also affect the expression of endogenous phosphoglucomutases in the cell. These shortcomings may be overcome by recombinantly expressing at least one phosphoglucomutase in the cell. Accordingly, in certain embodiments, a host cell of the present disclosure expresses at least one recombinant cellodextrin transporter in combination with at least one recombinant phosphoglucomutase.

[0129] In other embodiments host cells containing a cellodextrin transporter are capable of degrading cellodextrins, such as cellobiose, to glucose. However, in order for the cell to utilize glucose, the glucose needs to be phosphorylated to glucose-6-phosphate. Generally, glucose is phosphorylated to glucose-6-phosphate by hexokinases that are naturally expressed in the cell. However, host cells of the present disclosure may not express a sufficient amount of hexokinase activity to efficiently convert all the glucose produced by the degradation of cellodextrins. Moreover, the expression of other recombinant proteins or enzymes, or the growth conditions utilized may also affect the expression of endogenous hexokinases in the cell. These shortcomings may be overcome by recombinantly expressing at least one hexokinase in the cell. Accordingly, in certain embodiments, a host cell of the present disclosure expresses at least one recombinant cellodextrin transporter in combination with at least one recombinant hexokinase.

[0130] Cellodextrin Phosphorylases

[0131] Other aspects of the present disclosure relate to host cells that contain a recombinant cellodextrin phosphorylase. Cellodextrin phosphorylases of the present disclosure catalyze the degradation of a cellodextrin by utilizing inorganic phosphate to cleave β-glucosidic linkages between glucose moieties in the cellodextrin. Cellodextrin phosphorylases of the present disclosure may include polypeptides having EC 2.4.1.49 activity, which catalyze the following reaction: (1,4-β-D-glucosyl)ₙ+inorganic phosphate⇄(1,4-β-D-glucosyl)ₙ₋₁+α-D-glucose-1-phosphate. Polypeptides having EC 2.4.1.49 activity belong to the GH 94 family of glycoside hydrolases. Polypeptides with EC 2.4.1.49 activity include, without limitation, 1,4-beta-D-oligo-D-glucan:phosphate alpha-D-glucosyltransferases and beta-1,4-oligoglucan:orthophosphate glucosyltransferases.

[0132] Cellodextrin phosphorylases of the present disclosure also include cellobiose phosphorylase enzymes having EC 2.4.1.20 activity, which catalyze the following reaction: cellobiose+inorganic phosphate⇄α-D-glucose-1-phosphate+D-glucose. Enzymes having EC 2.4.1.20 activity belong to the hexosyltransferase family of glycoside hydrolases. Enzymes with EC 2.4.1.20 activity include, without limitation, cellobiose phosphorylases and cellobiose:phosphate alpha-D-glucosyltransferases.

[0133] In certain embodiments, a cellodextrin phosphorylase of the present disclosure is a functional fragment that maintains the catalytic activity of the corresponding full length cellodextrin phosphorylase.

[0134] Suitable cellodextrin phosphorylases may be obtained from cellulolytic microorganisms. Examples of such microorganisms include, without limitation, Celvibrio gilvus, Sacharophagus degradans, and Clostridium thermocellum. Examples of suitable cellodextrin phosphorylases include, without limitation, those listed in Table 3, homologs thereof, and orthologs thereof.

[0135] Table 3: Cellobiose Phosphorylases

TABLE 3
Cellobiose Phosphorylases

| NCBI Reference | |
|---|---|
| Sequence | Organism |
| YP_001036707.1 | Clostridium_thermocellum_ATCC_27405 |
| ZP_06248015.1 | Clostridium thermocellum JW20 |
| BAA25846.1 | Clostridium thermocellum |
| ZP_07328762.1 | Acetivibrio cellulolyticus CD2 |
| YP_004462192.1 | Mahella australiensis 50-1 BON |
| ZP_08194540.1 | Clostridium papyrosolvens DSM 2782 |
| YP_002506434.1 | Clostridium cellulolyticum H10 |
| YP_002534325.1 | Thermotoga neapolitana DSM 4359 |
| NP_229644.1 | Thermotoga maritime MSB8 |
| YP_001244545.1 | Thermotoga petrophila RKU-1 |
| AAB95491.2 | Thermotoga neapolitana |
| CAB16926.1 | Thermotoga neapolitana |
| YP_003839734. | Caldicellulosiruptor obsidiansis OB47 |
| YP_004797912.1 | Caldicellulosiruptor lactoaceticus 6A |
| YP_004027280.1 | Caldicellulosiruptor kristjanssonii 177R1B |
| YP_004001699.1 | Caldicellulosiruptor owensensis OL |
| YP_002572365.1 | Caldicellulosiruptor bescii DSM 6725 |
| YP_001557556.1 | Clostridium phytofermentans ISDg |
| YP_004024831.1 | Caldicellulosiruptor kronotskyensis 2002 |
| YP_003841585.1 | Clostridium cellulovorans 743B |
| YP_003993282.1 | Caldicellulosiruptor hydrothermalis 108 |
| YP_001179895.1 | Caldicellulosiruptor saccharolyticus DSM |
| | 8903 |
| AAC45510.1 | Clostridium stercorarium |
| ZP_02421512.1 | Eubacterium siraeum DSM 15702 |
| CBL33370.1 | Eubacterium siraeum V10Sc8a |
| YP_004309477.1 | Clostridium lentocellum DSM 5427 |
| CBK97022.1 | Eubacterium siraeum 70/3 |
| YP_526792.1 | Saccharophagus degradans 2-40 |
| YP_002352548.1 | Dictyoglomus turgidum DSM 6724 |
| YP_002250367.1 | Dictyoglomus thermophilum H-6-12 |
| ZP_08848217.1 | Anaerophaga thermohalophila DSM 12881 |
| YP_003870668.1 | Paenibacillus polymyxa E681 |
| YP_003861246.1 | Maribacter sp. HTCC2170 |
| YP_003074163.1 | Teredinibacter turnerae T7901 |
| AEJ60757.1 | Spirochaeta thermophila DSM 6578 |
| CBL18325.1 | Ruminococcus sp. 18P13 |
| ZP_08470173.1 | Dysgonomonas mossii DSM 22836 |
| YP_003875014.1 | Spirochaeta thermophila DSM 6192 |
| ZP_01113063.1 | Reinekea sp. MED297 |
| ZP_06145290.1 | Ruminococcus flavefaciens FD-1 |
| YP_004042937.1 | Paludibacter propionicigenes WB4 |
| ZP_08158670.1 | Ruminococcus albus 8 |
| YP_004103378.1 | Ruminococcus albus 7 |
| YP_002509717.1 | Halothermothrix orenii H 168 |
| CBK83462.1 | Coprococcus sp. ART55/1 |
| ZP_02074262.1 | Clostridium sp. L2-50 |
| ZP_02206204.1 | Coprococcus eutactus ATCC 27759 |
| CBL11091.1 | Roseburia intestinalis XB6B4 |
| CBL09808.1 | Roseburia intestinalis M50/1 |
| ZP_06201842.1 | Bacteroides sp. D20 |
| ZP_02068984.1 | Bacteroides uniformis ATCC 8492 |
| ADD61402.1 | Uncultured organism |
| YP_002936968.1 | Eubacterium rectale ATCC 33656 |
| CBK93948.1 | Eubacterium rectale M104/1 |
| ZP_07882835.1 | Prevotella buccae ATCC 33574 |
| ZP_06418755.1 | Prevotella buccae D17 |
| YP_004837718.1 | Roseburia hominis A2-183 |
| ZP_06252207.1 | Prevotella copri DSM 18205 |
| ZP_03754075.1 | Roseburia inulinivorans DSM 16841 |
| CBK73469.1 | Butyrivibrio fibrisolvens 16/4 |
| ZP_07059510.1 | Prevotella bryantii B14 |
| ZP_07838874.1 | Eubacterium cellulosolvens 6 |
| YP_003573551.1 | Prevotella ruminicola 23 |
| YP_004451849.1 | Cellulomonas fimi ATCC 484 |
| gi\|109157379\|pdb\|2CQS | Cellvibrio gilvus |
| gi\|315364402\|pdb\|3ACT\| | Cellvibrio gilvus |
| gi\|315364400\|pdb\|3ACS | Cellvibrio gilvus |

[0136] In some embodiments, the cellodextrin phosphorylase is a cellobiose phosphorylase (CBP). Examples of suitable cellobiose phosphorylases include, without limitation, the Celvibrio gilvus cellobiose phosphorylase CgCBP, the Sacharophagus degradans cellobiose phosphorylase SdCBP, the Clostridium thermocellum cellobiose phosphorylase CtCBP, homologs thereof, and orthologs thereof.

TABLE 4
Cellobiose Phosphorylases

| NCBI Reference | |
|---|---|
| Sequence | Organism |
| C0FUS5 | Roseburia inulinivorans |
| D1PD04 | Prevotella copri |
| A8S7N6 | Faecalibacterium prausnitzii |
| B0MKI1 | Eubacterium siraeum |
| G0VV46 | Paenibacillus polymyxa |
| Q8VP44 | Clostridium thermocellum |
| C7H9T5 | Faecalibacterium prausnitzii |
| D4KUQ1 | Roseburia intestinalis |
| D3HVI4 | Prevotella buccae |
| E4K6D0 | Caldicellulosiruptor lactoaceticus |
| A7A4F8 | Bifidobacterium adolescentis |
| F7KEC8 | Lachnospiraceae bacterium |
| C7GDZ2 | Roseburia intestinalis |
| D8DTL6 | Prevotella bryantii |
| O66383 | Clostridium thermocellum |
| E1KJE9 | Acetivibrio cellulolyticus |
| C6LE12 | Marvinbryantia formatexigens |
| O87964 | Thermotoga neapolitana |
| E5V814 | Bacteroides sp. |
| A7VDP1 | Clostridium sp. |
| A7UYL3 | Bacteroides uniformis |
| E9SB92 | Ruminococcus albus |
| Q59316 | Clostridium stercorarium |
| D5HEX9 | Coprococcus sp. |
| F9D678 | Prevotella dentalis |
| A4BA76 | Reinekea blandensis |
| D4LUD5 | Ruminococcus obeum |
| C7HGL0 | Clostridium thermocellum |
| A4Q9G7 | Cellulomonas flavigena |
| A8SQ49 | Coprococcus eutactus |
| D4KSF6 | Roseburia intestinalis |
| A5ZX10 | Ruminococcus obeum |
| D4JK01 | Eubacterium rectale |
| D6KW25 | Scardovia inopinata |
| Q7WTR6 | Cellulomonas uda |
| D4JVA3 | Eubacterium siraeum |
| C6IVN7 | Paenibacillus sp. |
| D4MHY7 | Eubacterium siraeum |
| F1THV9 | Clostridium papyrosolvens |
| E2ZJ10 | Faecalibacterium sp. |
| D4LFD0 | Ruminococcus sp. |
| O66264 | Cellvibrio gilvus |
| E6K807 | Prevotella buccae |
| D4J030 | Butyrivibrio fibrisolvens |
| E4MK94 | Eubacterium cellulosolvens |
| D2EVQ9 | Bacteroides sp. |
| O52504 | Thermotoga neapolitana |
| D6DYH9 | Eubacterium rectale |
| F8X006 | Dysgonomonas mossii |
| D1NLD9 | Clostridium thermocellum |
| D4K816 | Faecalibacterium prausnitzii |
| C4G2K5 | Abiotrophia defectiva |
| A5IL96 | Thermotoga petrophila |
| E4T5F8 | Paludibacter propionicigenes |
| E0RKP2 | Paenibacillus polymyxa |
| E4S6A9 | Caldicellulosiruptor kristjanssonii |
| E3EI03 | Paenibacillus polymyxa |
| A4XIG9 | Caldicellulosiruptor saccharolyticus |
| B8DZK1 | Dictyoglomus turgidum |
| B8I421 | Clostridium cellulolyticum |
| F8A760 | Cellvibrio gilvus |
| B5YCV9 | Dictyoglomus thermophilum |
| E4SGY7 | Caldicellulosiruptor kronotskyensis |
| Q9X2G3 | Thermotoga maritima |
| E6ULX2 | Clostridium thermocellum |
| C5BMK9 | Teredinibacter turnerae |
| B9K7M6 | Thermotoga neapolitana |
| Q21L49 | Saccharophagus degradans |
| D5UG84 | Cellulomonas flavigena |
| E0RZR4 | Butyrivibrio proteoclasticus |
| B9MNR3 | Anaerocellum thermophilum |
| D1BX62 | Xylanimonas cellulosilytica |
| D5EVL5 | Prevotella ruminicola |
| C4Z6T4 | Eubacterium eligens |
| A9KHF0 | Clostridium phytofermentans |
| D2C6W3 | Thermotoga naphthophila |
| E4Q363 | Caldicellulosiruptor owensensis |
| A4AVU9 | Maribacter sp. |
| E4Q7Z5 | Caldicellulosiruptor hydrothermalis |
| F4H6V3 | Cellulomonas fimi |
| D9SMN6 | Clostridium cellulovorans |
| D9TIB6 | Caldicellulosiruptor obsidiansis |
| B8CZK3 | Halothermothrix orenii |
| F2JIB3 | Cellulosilyticum lentocellum |
| E6UCF2 | Ruminococcus albus |
| C4ZGN7 | Eubacterium rectale |
| D9R0E3 | Clostridium saccharolyticum |
| F3ZVZ6 | Mahella australiensis |
| A3DC35 | Clostridium thermocellum |
| B1LAH0 | Thermotoga sp. |
| D9ZDJ8 | Uncultured organism |

[0137] A cellodextrin phosphorylase of the present disclosure may include, without limitation, the Clostridium lentocellum cellodextrin phosphorylase CDP_Clent, the Clostridium thermocellum cellodextrin phosphorylase CDP_Ctherm, and the Acidovibrio cellulolyticus cellodextrin phosphorylase CDP_Acell. In certain embodiments, the cellodextrin phosphorylase has an amino acid sequence with at least about 20%, at least about 25%, at least about 30%, at least about 40%, at least about 50%, at least about 55%, at least about 60%, at least about 65%, at least about 70%, at least about 75%, at least about 80%, at least about 85%, at least about 90%, at least about 91%, at least about 92%, at least about 93%, at least about 94%, at least about 95%, at least about 96%, at least about 97%, at least about 98%, at least about 99%, or at least about 100% amino acid identity to that of CDP_Clent, CDP_Ctherm, or CDP_Acell.

[0138] In certain preferred embodiments, a cellodextrin phosphorylase of the present disclosure has an amino acid sequence with at least about 20%, at least about 25%, at least about 30%, at least about 40%, at least about 50%, at least about 55%, at least about 60%, at least about 65%, at least about 70%, at least about 75%, at least about 80%, at least about 85%, at least about 90%, at least about 91%, at least about 92%, at least about 93%, at least about 94%, at least about 95%, at least about 96%, at least about 97%, at least about 98%, at least about 99%, or at least about 100% amino acid identity to CgCBP (SEQ ID NO: 11), SdCBP (SEQ ID NO: 12), or CtCBP (SEQ ID NO: 13).

[0139] In other embodiments, a host cell of the present disclosure contains at least one additional recombinant cellodextrin phosphorylase, or functional fragment thereof. Preferably, the at least one additional recombinant cellodextrin phosphorylase is a cellobiose phosphorylase selected from CgCBP, SdCBP, and CtCBP.

[0140] Cellodextrin Phosphorylase Sequence Motifs

[0141] The amino acid sequences of Clostridium thermocellum (BAA22081.1), Acidovibrio cellulolyticus (ZP_{—}07328763.1) and Clostridium lentocellum (YP_{—}004310865.1) cellodextrin phosphorylases were simultaneously analyzed by PSI-BLAST to identify polypeptides that are annotated as “cellodextrin phosphorylases.” All such identified polypeptides were then used as inputs for a second round of PSI-BLAST. From these results, the cellodextrin phosphorylase sequences were analyzed by PRATT analysis (ExPASy Bioinformatics website), which identified a conserved PROSITE motif. The conserved sequence is: G-x(2)-[FY]-x-N-[AGS]-x-[AS]-W-[APS]-V-[IL]-[AS]-x(2)-A-x(2)-[DE]-x-[AI]-x(3)-[LMV]-[DEN]-[ASV]-[ILV]-x(3)-L-x-T-x(2)-G-[ILV]-x(2)-[SV]-x-P-[AG] (SEQ ID NO: 14). As an example of how to read a PROSITE motif, the following motif, [AC]-x-V-x(4)-{ED}(SEQ ID NO: 200), is translated as: [Ala or Cys]-any-Val-any-any-any-any-{any but Glu or Asp}(SEQ ID NO: 200). This conserved motif may be used to identify further cellodextrin phosphorylases. For example, SEQ ID NO: 14 was used to identify 16 additional cellodextrin phosphorylases by using the PROSITE server (PROSITE ExPASy website). Accordingly, suitable cellodextrin phosphorylases of the present disclosure include the 16 identified cellodextrin phosphorylases listed in Table 4.

TABLE 4
Cellodextrin Phosphorylases Identified by PROSITE

| NCBI Reference | |
|---|---|
| Sequence | Organism |
| F9AJY7 | Vibrio cholerae |
| G0GFK3 | Spirochaeta thermophila |
| Q93HT8 | Clostridium thermocellum |
| P77846 | Clostridium stercorarium |
| O24780 | Clostridium thermocellum |
| C7HEH9 | Clostridium thermocellum |
| F9SHD3 | Vibrio splendidus |
| A3UQH5 | Vibrio splendidus |
| A5KVQ6 | Vibrionales bacterium |
| A3XS61 | Vibrio sp. |
| D1NRB6 | Clostridium thermocellum |
| C9RP13 | Fibrobacter succinogenes |
| E0RQX7 | Spirochaeta thermophila |
| A3DJQ6 | Clostridium thermocellum |
| E6UTK1 | Clostridium thermocellum |
| B7VTD2 | Vibrio splendidus |

[0142] Amino acid sequence alignment and PRATT analysis (ExPASy Bioinformatics website) of the cellobiose phosphorylase proteins listed in Table 3 revealed that these proteins contain a conserved PROSITE motif. The conserved sequence is: Y-Q-[CN]-M-[IV]-T-F-[CN]-[HLMV]-[AS]-R-[ST]-[AS]-S-[FY]-[FY]-E-[STV]-G-x-[GS]-R-G-[IM]-G-F-R-D-S-[ACNS]-Q-D-[ILV]-[ILMV]-G-x-V-H-x-[IV]-P-[ADEST]-x-[AV]-[KR]-[AEQ]-x-[IL]-[FIL]-D (SEQ ID NO: 15). This conserved motif may be used to identify other cellobiose phosphorylases. For example, SEQ ID NO: 15 was used to identify 91 additional cellobiose phosphorylases by using the PROSITE server (PROSITE ExPASy website). Accordingly, suitable cellobiose phosphorylases of the present disclosure include the 91 identified cellobiose phosphorylases listed in Table 5. Specific cellodextrin phosphorylases may be preferred depending on the cellodextrin transporter that may be contained in the host cell.

TABLE 5
Cellobiose Phosphorylases Identified by PROSITE

| NCBI Reference | |
|---|---|
| Sequence | Organism |
| C0FUS5 | Roseburia inulinivorans |
| D1PD04 | Prevotella copri |
| A8S7N6 | Faecalibacterium prausnitzii |
| B0MKI1 | Eubacterium siraeum |
| G0VV46 | Paenibacillus polymyxa |
| Q8VP44 | Clostridium thermocellum |
| C7H9T5 | Faecalibacterium prausnitzii |
| D4KUQ1 | Roseburia intestinalis |
| D3HVI4 | Prevotella buccae |
| E4K6D0 | Caldicellulosiruptor lactoaceticus |
| A7A4F8 | Bifidobacterium adolescentis |
| F7KEC8 | Lachnospiraceae bacterium |
| C7GDZ2 | Roseburia intestinalis |
| D8DTL6 | Prevotella bryantii |
| O66383 | Clostridium thermocellum |
| E1KJE9 | Acetivibrio cellulolyticus |
| C6LE12 | Marvinbryantia formatexigens |
| O87964 | Thermotoga neapolitana |
| E5V814 | Bacteroides sp. |
| A7VDP1 | Clostridium sp. |
| A7UYL3 | Bacteroides uniformis |
| E9SB92 | Ruminococcus albus |
| Q59316 | Clostridium stercorarium |
| D5HEX9 | Coprococcus sp. |
| F9D678 | Prevotella dentalis |
| A4BA76 | Reinekea blandensis |
| D4LUD5 | Ruminococcus obeum |
| C7HGL0 | Clostridium thermocellum |
| A4Q9G7 | Cellulomonas flavigena |
| A8SQ49 | Coprococcus eutactus |
| D4KSF6 | Roseburia intestinalis |
| A5ZX10 | Ruminococcus obeum |
| D4JK01 | Eubacterium rectale |
| D6KW25 | Scardovia inopinata |
| Q7WTR6 | Cellulomonas uda |
| D4JVA3 | Eubacterium siraeum |
| C6IVN7 | Paenibacillus sp. |
| D4MHY7 | Eubacterium siraeum |
| F1THV9 | Clostridium papyrosolvens |
| E2ZJ10 | Faecalibacterium sp. |
| D4LFD0 | Ruminococcus sp. |
| O66264 | Cellvibrio gilvus |
| E6K807 | Prevotella buccae |
| D4J030 | Butyrivibrio fibrisolvens |
| E4MK94 | Eubacterium cellulosolvens |
| D2EVQ9 | Bacteroides sp. |
| O52504 | Thermotoga neapolitana |
| D6DYH9 | Eubacterium rectale |
| F8X006 | Dysgonomonas mossii |
| D1NLD9 | Clostridium thermocellum |
| D4K816 | Faecalibacterium prausnitzii |
| C4G2K5 | Abiotrophia defectiva |
| A5IL96 | Thermotoga petrophila |
| E4T5F8 | Paludibacter propionicigenes |
| E0RKP2 | Paenibacillus polymyxa |
| E4S6A9 | Caldicellulosiruptor kristjanssonii |
| E3EI03 | Paenibacillus polymyxa |
| A4XIG9 | Caldicellulosiruptor saccharolyticus |
| B8DZK1 | Dictyoglomus turgidum |
| B8I421 | Clostridium cellulolyticum |
| F8A760 | Cellvibrio gilvus |
| B5YCV9 | Dictyoglomus thermophilum |
| E4SGY7 | Caldicellulosiruptor kronotskyensis |
| Q9X2G3 | Thermotoga maritima |
| E6ULX2 | Clostridium thermocellum |
| C5BMK9 | Teredinibacter turnerae |
| B9K7M6 | Thermotoga neapolitana |
| Q21L49 | Saccharophagus degradans |
| D5UG84 | Cellulomonas flavigena |
| E0RZR4 | Butyrivibrio proteoclasticus |
| B9MNR3 | Anaerocellum thermophilum |
| D1BX62 | Xylanimonas cellulosilytica |
| D5EVL5 | Prevotella ruminicola |
| C4Z6T4 | Eubacterium eligens |
| A9KHF0 | Clostridium phytofermentans |
| D2C6W3 | Thermotoga naphthophila |
| E4Q363 | Caldicellulosiruptor owensensis |
| A4AVU9 | Maribacter sp. |
| E4Q7Z5 | Caldicellulosiruptor hydrothermalis |
| F4H6V3 | Cellulomonas fimi |
| D9SMN6 | Clostridium cellulovorans |
| D9TIB6 | Caldicellulosiruptor obsidiansis |
| B8CZK3 | Halothermothrix orenii |
| F2JIB3 | Cellulosilyticum lentocellum |
| E6UCF2 | Ruminococcus albus |
| C4ZGN7 | Eubacterium rectale |
| D9R0E3 | Clostridium saccharolyticum |
| F3ZVZ6 | Mahella australiensis |
| A3DC35 | Clostridium thermocellum |
| B1LAH0 | Thermotoga sp. |
| D9ZDJ8 | Uncultured organism |

[0143] Additionally, the x-ray crystal structure of the Cellvibrio gilvus cellobiose phosphorylase was used with PDB ID 3QG0, and was analyzed by PRATT analysis (ExPASy Bioinformatics website) to identify a conserved PROSITE motif that is conserved among both cellobiose phosphorylases and cellodextrin phosphorylases. The conserved motif is: Y-x(2)-G-x-[KR]-E-N-[AG]-[AG]-[IV]-F-x(2)-[ANST]-[NST]-x(2)-[AIV]-x(2)-[AGT]-x(4)-[AG]-x(4)-[ADNS] (SEQ ID NO: 233). This conserved motif may be used to identify further cellobiose phosphorylases and cellodextrin phosphorylases.

[0144] Accordingly, certain aspects of the present disclosure relate to cellodextrin phosphorylases and cellobiose phosphorylases having a conserved motif. In certain embodiments, a cellodextrin phosphorylase or cellobiose phosphorylase of the present disclosure, or functional fragment thereof, contains the sequence SEQ ID NO: 233. In other embodiments, a cellodextrin phosphorylase of the present disclosure, or functional fragment thereof, contains the sequence SEQ ID NO: 14. In further embodiments, a cellobiose phosphorylase of the present disclosure, or functional fragment thereof, contains the sequence SEQ ID NO: 15.

[0145] Mutant Cellodextrin Phosphorylases

[0146] Other aspects of the present disclosure relate to mutant cellodextrin phosphorylases that may be used to increase the function and/or activity of a cellodextrin phosphorylase of the present disclosure. In certain embodiments, the mutant cellodextrin phosphorylase is a cellobiose phosphorylase. Mutant cellodextrin phosphorylases may be produced by mutating a polynucleotide encoding a cellodextrin phosphorylase of the present disclosure. In some embodiments, a mutant cellodextrin phosphorylase of the present disclosure may contain at least one mutation that includes, without limitation, a point mutation, a missense mutation, a substitution mutation, a frameshift mutation, an insertion mutation, a duplication mutation, an amplification mutation, a translocation mutation, or an inversion mutation that results in a cellodextrin phosphorylase with increased function and/or activity.

[0147] Methods of generating at least one mutation in a cellodextrin phosphorylase of interest are well known in the art and include, without limitation, random mutagenesis and screening, site-directed mutagenesis, PCR mutagenesis, insertional mutagenesis, chemical mutagenesis, and irradiation.

[0148] In some embodiments, the mutant cellodextrin phosphorylase contains one or more amino acid substitutions. For example, a cellodextrin phosphorylase of the present disclosure may contain an amino acid substitution at one or more positions corresponding to positions of the amino acid sequence of any of the cellodextrin phosphorylases or cellobiose phosphorylases listed in Tables 3 and 4, respectively. Additionally, a cellodextrin phosphorylase of the present disclosure may contain an amino acid substitution at one or more positions corresponding to positions of the amino acid sequence of CDP_Clent, CDP_Ctherm, or CDP_Acell. In other embodiments, a cellobiose phosphorylase of the present disclosure may contain an amino acid substitution at one or more positions corresponding to positions of the amino acid sequence of CgCBP (SEQ ID NO: 11), SdCBP (SEQ ID NO: 12), or CtCBP (SEQ ID NO: 13).

[0149] Additionally, a mutant cellobiose phosphorylase of the present disclosure may contain an amino acid substitution at one or more positions corresponding to positions of the amino acid sequence of SdCBP (SEQ ID NO: 12). Suitable one or more positions include, without limitation, a position corresponding to amino acid 409 of SEQ ID NO: 12, a position corresponding to amino acid 482 of SEQ ID NO: 12, a position corresponding to amino acid 484 of SEQ ID NO: 12, a position corresponding to amino acid 651 of SEQ ID NO: 12, a position corresponding to amino acid 653 of SEQ ID NO: 12, and combinations thereof.

[0150] In one non-limiting example, the amino acid substitution at one or more positions are an isoleucine (I) to glutamine (Q) substitution at a position corresponding to amino acid 409 of SEQ ID NO: 12; an isoleucine (I) to methionine (M) substitution at a position corresponding to amino acid 409 of SEQ ID NO: 12; an asparagine (N) to aspartate (D) substitution at a position corresponding to amino acid 482 of SEQ ID NO: 12; an asparagine (N) to threonine (T) substitution at a position corresponding to amino acid 482 of SEQ ID NO: 12; a cysteine (C) to serine (S) substitution at a position corresponding to amino acid 484 of SEQ ID NO: 12; a cysteine (C) to alanine (A) substitution at a position corresponding to amino acid 484 of SEQ ID NO: 12; a phenylalanie (F) to tryptophan (W) substitution at a position corresponding to amino acid 651 of SEQ ID NO: 12; a histidine (H) to asparagine (N) substitution at a position corresponding to amino acid 653 of SEQ ID NO: 12; a histidine (H) to alanine (A) substitution at a position corresponding to amino acid 653 of SEQ ID NO: 12; or combinations thereof. In certain preferred embodiments, the amino acid substitution at one or more positions is an isoleucine (I) to methionine (M) substitution at a position corresponding to amino acid 409 of SEQ ID NO: 12 and/or an asparagine (N) to aspartate (D) substitution at a position corresponding to amino acid 482 of SEQ ID NO: 12.

[0151] In some embodiments, the increased function and/or activity of a mutant cellodextrin phosphorylase results in a host cell that degrades cellodextrins, such as cellobiose, at a greater rate than the rate of cellodextrin degradation in a cell expressing a wild-type (i.e., non-mutant) cellodextrin phosphorylase. For example, the rate of cellodextrin degradation in a host cell containing a mutant cellodextrin phosphorylase may be at least 5%, at least 10%, at least 15%, at least 20%, at least 25%, at least 30%, at least 35%, at least 40%, at least 45%, at least 50%, at least 55%, at least 60%, at least 65%, at least 70%, at least 75%, at least 80%, at least 85%, at least 90%, at least 95%, at least 100%, at least 125%, at least 150%, at least 175%, at least 200%, at least 225%, at least 250%, at least 275%, at least 300%, or at least a higher percentage greater than the rate of cellodextrin degradation in a host cell containing a corresponding wild-type cellodextrin phosphorylase.

[0152] Combinations with Cellodextrin Phosphorylases

[0153] Further aspects of the present disclosure relate to host cells that contain at least one recombinant cellodextrin phosphorylase of the present disclosure in combination with one or more of a recombinant β-glucosidase of the present disclosure, a recombinant phosphoglucomutase of the present disclosure, and a recombinant hexokinase of the present disclosure.

[0154] In some embodiments, host cells of the present disclosure containing a recombinant cellodextrin phosphorylase are capable of transporting cellodextrins, such as cellobiose, into the cell. Such host cells can transport cellodextrins by expressing endogenous proteins or recombinant proteins that transport cellodextrins, such as cellobiose, into the cell. In such embodiments, host cells containing a recombinant cellodextrin phosphorylase can be grown under different stress conditions where it can be beneficial to express the recombinant cellodextrin phosphorylase in combination with a recombinant β-glucosidase. Additionally, the host cells can be engineered to optimize the cellodextrin phosphorylase pathway and β-glucosidase pathway under different stress conditions. Accordingly, in certain embodiments, a host cell of the present disclosure expresses at least one recombinant cellodextrin phosphorylase in combination with at least one recombinant β-glucosidase.

[0155] In other embodiments, host cells containing a recombinant cellodextrin phosphorylase phosphorolytically cleave cellodextrins to glucose-1-phosphate and shorter-chain cellodextrins. In such embodiments, the glucose-1-phosphate needs to be converted to glucose-6-phosphate in order to be utilized by the cell. Glucose-1-phosphate can be converted to glucose-6-phosphate by phosphoglucomutases that are naturally expressed in the host cell. However, phosphoglucomutases can be transcriptionally downregulated during glycolytic growth. Moreover, the expression of other recombinant proteins or enzymes, or the growth conditions utilized may also affect the expression of endogenous phosphoglucomutases in the cell. These shortcomings may be overcome by recombinantly expressing at least one phosphoglucomutase in the cell. Accordingly, in certain embodiments, a host cell of the present disclosure expresses at least one recombinant cellodextrin phosphorylase in combination with at least one recombinant phosphoglucomutase.

[0156] In further embodiments, host cells containing a recombinant cellodextrin phosphorylase are capable of degrading cellodextrins, such as cellobiose, to glucose. In order for the cell to utilize the produced glucose, the glucose needs to be phosphorylated to glucose-6-phosphate. Generally, glucose is phosphorylated to glucose-6-phosphate by hexokinases that are naturally expressed in the cell. However, host cells of the present disclosure may not express a sufficient amount of hexokinase activity to efficiently phosphorylate all the produced glucose. Moreover, the expression of other recombinant proteins or enzymes, or the growth conditions utilized may also affect the expression of endogenous hexokinases in the cell. These shortcomings may be overcome by recombinantly expressing at least one hexokinase in the cell. Accordingly, in certain embodiments, a host cell of the present disclosure expresses at least one recombinant cellodextrin phosphorylase in combination with at least one recombinant hexokinase.

[0157] β-Glucosidases

[0158] Further aspects of the present disclosure relate to host cells that utilize an intracellular β-glucosidase in addition to a cellodextrin phosphorylase, or in embodiments where ATP is not limiting, in place of a cellodextrin phosphorylase. The β-glucosidase may be endogenous or recombinant to the host cell. As used herein, β-glucosidase refers to a β-D-glucoside glucohydrolase (E.C. 3.2.1.21), which catalyzes the hydrolysis of terminal non-reducing β-D-glucose residues with the release of β-D-glucose. A β-glucosidase is any enzyme that catalyzes the hydrolysis of terminal non-reducing residues in β-D-glucosides with release of glucose.

[0159] In certain embodiments, a β-glucosidase of the present disclosure is a functional fragment that maintains the catalytic activity of the corresponding full length β-glucosidase.

[0160] Suitable β-glucosidases include, without limitation, members of the Glycosyl Hydrolase Family 1 (GH1) family of glycosyl hydrolases. In some embodiments, the β-glucosidase is from N. crassa, and in certain preferred embodiments, the β-glucosidase is NCU00130, which is also known as GH1-1. Suitable β-glucosidases of the present disclosure also include homologs and orthologs of NCU00130. Examples of NCU00130 include, without limitation, T. melanosporum, CAZ82985.1; A. oryzae, BAE57671.1; P. placenta, EED81359.1; P. chrysosporium, BAE87009.1; Kluyveromyces lactis, CAG99696.1; Laccaria bicolor, EDR09330; Clavispora lusitaniae, EEQ37997.1; and Pichia stipitis, ABN67130.1.

[0161] β-Glucosidase Sequence Motifs

[0162] As disclosed herein, β-glucosidases of the present disclosure include members of the GH1 family of glycosyl hydrolases. PRATT analysis (ExPASy Bioinformatics website) of members of this group identified the presence of two conserved PROSITE motifs. The first PROSITE motif matches a conserved portion of the N-terminus and has the sequence: F-x-[FYWM]-[GSTA]-x-[GSTA]-x-[GSTA](2)-[FYNH]-[NQ]-x-E-x-[GSTA] (SEQ ID NO: 16). The second PROSITE motif matches a conserved portion of the surrounding active site and has the sequence: [LIVMFSTC]-[LIVFYS]-[LIV]-[LIVMST]-E-N-G-[LIVMFAR]-[CSAGN] (SEQ ID NO: 17). Here, E is the catalytic glutamate. As an example of how to read a PROSITE motif, the following motif, [AC]-x-V-x(4)-{ED}(SEQ ID NO: 200), is translated as: [Ala or Cys]-any-Val-any-any-any-any-{any but Glu or Asp}(SEQ ID NO: 200). While these two conserved motifs may be generally used to identify further β-glucosidases, it should be noted that not all β-glucosidases of the GH1 family of glycosyl hydrolases will contain both conserved motifs. For example, NCU00130 contains the conserved motif of SEQ ID NO: 16 but lacks the conserved motif of SEQ ID NO: 17.

[0163] Additional suitable β-glucosidases include those from the Glycosyl Hydrolase Family 3 family of glycosyl hydrolases. PRATT analysis (ExPASy Bioinformatics website) of members of this group identified the presence of a PROSITE motif that matched a conserved portion of the surrounding active site. The conserved sequence is [LIVM](2)-[KR]-x-[EQKRD]-x(4)-G-[LIVMFTC]-[LIVT]-[LIVMF]-[ST]-D-x(2)-[SGADNIT] (SEQ ID NO: 18). Here D is the catalytic aspartate. This conserved motif may be used to identify further β-glucosidases.

[0164] Moreover, suitable β-glucosidases may also include any β-glucosidase that contains the conserved domain of β-glucosidase/6-phospho-β-glucosidase/β-galactosidase found in NCBI sequence COG2723. Specific β-glucosidases may be preferred depending on the cellodextrin transporter that may be contained in the host cell.

[0165] Accordingly, certain aspects of the present disclosure relate to β-glucosidases having one or more conserved motifs. In certain embodiments, a β-glucosidase of the present disclosure, or functional fragment thereof, contains one or more sequences selected from SEQ ID NO: 16, SEQ ID NO: 17, and SEQ ID NO: 18. In other embodiments, a β-glucosidase of the present disclosure, or functional fragment thereof, contains two or more sequences selected from SEQ ID NO: 16, SEQ ID NO: 17, and SEQ ID NO: 18.

[0166] Combinations with β-Glucosidases

[0167] Further aspects of the present disclosure relate to host cells that contain at least one recombinant β-glucosidase of the present disclosure in combination with one or more of a recombinant phosphoglucomutase of the present disclosure and a recombinant hexokinase of the present disclosure.

[0168] In some embodiments, host cells of the present disclosure containing a recombinant β-glucosidase are capable of transporting cellodextrins, such as cellobiose, into the cell. Such host cells can transport cellodextrins by expressing endogenous proteins or recombinant proteins that transport cellodextrins, such as cellobiose, into the cell.

[0169] In some embodiments, host cells containing a recombinant β-glucosidase are also capable of phosphorolytically cleaving cellodextrins. The host cell may phosphorolytically cleave cellodextrins by either expressing an endogenous or a recombinant cellodextrin phosphorylase. Alternatively, the host cell may express an alternative pathway that results in the phosphorolytic cleavage of cellodextrins. In such embodiments, the phosphorolytic cleavage of cellodextrins results in the production of glucose-1-phosphate. However, in order for the cell to utilize the produced glucose-1-phosphate, it must convert the glucose-1-phosphate to glucose-6-phosphate. Glucose-1-phosphate can be converted to glucose-6-phosphate by phosphoglucomutases that are naturally expressed in the host cell. However, phosphoglucomutases can be transcriptionally downregulated during glycolytic growth. Moreover, the expression of other recombinant proteins or enzymes, or the growth conditions utilized may also affect the expression of endogenous phosphoglucomutases in the cell. These shortcomings may be overcome by recombinantly expressing at least one phosphoglucomutase in the cell. Accordingly, in certain embodiments, a host cell of the present disclosure expresses at least one recombinant β-glucosidase in combination with at least one recombinant phosphoglucomutase.

[0170] In other embodiments, host cells containing a recombinant β-glucosidase are capable of degrading cellodextrins, such as cellobiose, to glucose. In order for the cell to utilize the produced glucose, the glucose needs to be phosphorylated to glucose-6-phosphate. Generally, glucose is phosphorylated to glucose-6-phosphate by hexokinases that are naturally expressed in the cell. However, host cells of the present disclosure may not express a sufficient amount of hexokinase activity to efficiently phosphorylate all the produced glucose. Moreover, the expression of other recombinant proteins or enzymes, or the growth conditions utilized may also affect the expression of endogenous hexokinases in the cell. These shortcomings may be overcome by recombinantly expressing at least one hexokinase in the cell. Accordingly, in certain embodiments, a host cell of the present disclosure expresses at least one recombinant β-glucosidase in combination with at least one recombinant hexokinases.

[0171] Phosphoglucomutases

[0172] Other aspects of the present disclosure relate to host cells that contain a phosphoglucomutase. As used herein, a “phosphoglucomutase” refers to a polypeptide having EC 5.4.2.2 activity, which catalyzes the transfer of a phosphate group on an α-D-glucose monomer from the 1′ position to the 6′ position in the forward direction or the 6′ position to the 1′ position in the reverse direction. In particular, a polypeptide having EC 5.4.2.2 activity catalyzes the interconversion of glucose-1-phosphate and glucose-6-phosphate. In certain embodiments, a phosphoglucomutase of the present disclosure is a functional fragment that maintains the catalytic activity of the corresponding full length phosphoglucomutase.

[0173] Phosphoglucomutases of the present disclosure may be expressed either endogenously or ectopically in a host cell of the present disclosure. In embodiments where a phosphoglucomutase is expressed ectopically in a host cell of the present disclosure, the host cell further contains a recombinant phosphoglucomutase.

[0174] In certain preferred embodiments, the phosphoglucomutase is the S. cerevisiae phosphoglucomutase PGM2. In other embodiments, the phosphoglucomutase is a homolog or ortholog of the S. cerevisiae phosphoglucomutase PGM2. In further embodiments, the phosphoglucomutase is overexpressed.

[0175] Phosphoglucomutase Sequence Motifs

[0176] Amino acid sequence alignment and PRATT analysis (ExPASy Bioinformatics website) of known phosphoglucomutase genes revealed that these proteins contain a conserved PROSITE motif. The conserved sequence is: [GSA]-[LIVMF]-x-[LIVM]-[ST]-[PGA]-S-H-[NIC]-P (SEQ ID NO: 19). This conserved motif may be used to identify further phosphoglucomutases.

[0177] Accordingly, certain aspects of the present disclosure relate to phosphoglucomutases, or functional fragments thereof, having a conserved motif. In certain embodiments, a phosphoglucomutase of the present disclosure contains the sequence SEQ ID NO: 19.

[0178] Combinations with Phosphoglucomutase

[0179] Further aspects of the present disclosure relate to host cells that contain at least one recombinant phosphoglucomutase in combination with one or more recombinant hexokinases of the present disclosure.

[0180] In some embodiments, host cells of the present disclosure containing a recombinant phosphoglucomutase are capable of transporting cellodextrins, such as cellobiose, into the cell and are capable of degrading the transported cellodextrin. Such host cells can transport cellodextrins by expressing endogenous proteins or recombinant proteins that transport cellodextrins, such as cellobiose, into the cell. These host cells can also degrade the transported cellodextrins by expressing endogenous proteins or recombinant proteins that degrade cellodextrins. In such embodiments, host cells containing a recombinant phosphoglucomutase are capable of degrading cellodextrins, such as cellobiose, to glucose. In order for the cell to utilize the produced glucose, the glucose needs to be phosphorylated to glucose-6-phosphate. Generally, glucose is phosphorylated to glucose-6-phosphate by hexokinases that are naturally expressed in the cell. However, host cells of the present disclosure may not express a sufficient amount of hexokinase activity to efficiently phosphorylate all the produced glucose. Moreover, the expression of other recombinant proteins or enzymes, or the growth conditions utilized may also affect the expression of endogenous hexokinases in the cell. These shortcomings may be overcome by recombinantly expressing at least one hexokinase in the cell. Accordingly, in certain embodiments, a host cell of the present disclosure expresses at least one recombinant phosphoglucomutase in combination with at least one recombinant hexokinase.

[0181] Hexokinases

[0182] Further aspects of the present disclosure relate to host cells that contain a hexokinase. As used herein, a “hexokinase” refers to a polypeptide having EC 2.7.1.1 activity, which catalyzes the phosphorylation of a six-carbon sugar, a hexose, to a hexose phosphate. Preferably, hexokinases of the present disclosure phosphorylate glucose. In certain embodiments, a hexokinase of the present disclosure is a functional fragment that maintains the catalytic activity of the corresponding full length hexokinase.

[0183] Hexokinases of the present disclosure may be expressed either endogenously or ectopically in a host cell of the present disclosure. In embodiments where a hexokinase is expressed ectopically in a host cell of the present disclosure, the host cell further contains a recombinant hexokinase.

[0184] In certain embodiments, the hexokinase is the S. cerevisiae hexokinase HXK1, HXK2, or GLK1. Preferably, the hexokinase is the S. cerevisiae hexokinase HXK1. In other embodiments, the hexokinase is a homolog or ortholog of the S. cerevisiae hexokinase HXK1, HXK2, or GLK1. In further embodiments, the hexokinase is overexpressed.

[0185] Hexokinase Sequence Motifs

[0186] Amino acid sequence alignment and PRATT analysis (ExPASy Bioinformatics website) of known hexokinase genes revealed that these proteins contain a conserved PROSITE motif. The conserved sequence is: [LIVM]-G-F-[TN]-F-S-[FY]-P-x(5)-[LIVM]-[DNST]-x(3)-[LIVM]-x(2)-W-T-K-x-[LF] (SEQ ID NO: 20). This conserved motif may be used to identify further hexokinases.

[0187] Accordingly, certain aspects of the present disclosure relate to hexokinases, or functional fragments thereof, having a conserved motif. In certain embodiments, a hexokinase of the present disclosure contains the sequence SEQ ID NO: 20.

[0188] Glucose Response Genes

[0189] Host cells of the present disclosure may further contain one or more glucose response genes. The one or more glucose response genes may be recombinant or endogenous to the host cell. As used herein, a “glucose response gene” refers to any gene encoding a protein that is involved in a cell responding to glucose. Typically, the proteins encoded by glucose response genes allow a cell to “sense” or “perceive” the amount of glucose available to the cell for nutrients and to set metabolic and growth rates to match the available amount of glucose. The activities of the proteins encoded by glucose response genes ensure that the metabolism of the cell is optimal and glucose is efficiently utilized.

[0190] In preferred embodiments, the one or more glucose response genes are selected from Snf3, Rgt1, Rgt2, Yck1/2, Std1, Mthy1, Snf1/4, Grr1, Gpr1, Gpa2, Ras2, Stb3, Hxk2, Pfk27, Pfk26, Sch9, Yak1, Mig1, Rim15, Kcs1, and Tps1. In other embodiments, the one or more glucose response genes may be orthologs of Snf3, Rgt1, Rgt2, Yck1/2, Std1, Mthy1, Snf1/4, Grr1, Gpr1, Gpa2, Ras2, Stb3, Hxk2, Pfk27, Pfk26, Sch9, Yak1, Mig1, Rim15, Kcs1, or Tps1; or any genes encoding polypeptides having at least 29%, at least 30%, at least 35%, at least 40%, at least 45%, at least 50%, at least 55%, at least 60%, at least 65%, at least 70%, at least 75%, at least 80%, at least 85%, at least 90%, at least 95%, at least 99%, or at least 100% amino acid identity to the polypeptides encoded by Snf3, Rgt1, Rgt2, Yck1/2, Std1, Mthy1, Snf1/4, Grr1, Gpr1, Gpa2, Ras2, Stb3, Hxk2, Pfk27, Pfk26, Sch9, Yak1, Mig1, Rim15, Kcs1, or Tps1.

[0191] Snf3 (NM_{—}001180254.1) encodes a high affinity glucose sensor that detects low concentrations of extracellular glucose (Ozcan, PNAS, 1996).

[0192] Rgt1 (NM_{—}001179604.1) encodes a glucose-responsive transcription factor that regulates expression of several glucose transporter (HXT) genes in response to glucose (Kim and Johnston, J Biol Chem, 2006).

[0193] Rgt2 (NM_{—}001180198.1) is a low affinity glucose sensor that detects high concentrations of extracellular glucose (Ozcan, PNAS, 1996).

[0194] Yck1/2 (NM_{—}001179265.1, NM_{—}001182992.1) is a membrane-associated casein kinase I involved in glucose sensing. It is activated by the transmembrane portion of Snf3 or Rgt2. Yck1/2 phosphorylates Mthy1 and Std1 bound to Snf3 or Rgt2, which triggers their recognition by Grr1 ubiquitin ligase and subsequent degradation (Moriya and Johnston, PNAS, 2004).

[0195] The absence of Std1 (NM_{—}001183466.1) or Mthy1 (NM_{—}001180585.1) leads to phosphorylation of Rgt1, which prevents its binding to DNA and repression of HXT genes.

[0196] Snf1/4 (NM_{—}001180785.1, NM_{—}001180980.1) together form the SNF1 kinase complex, which is inactivated upon addition of glucose.

[0197] Grr1 (NM_{—}001181747.1) is a ubiquitin ligase containing Mthy1, Std1, Pfk27, Tye7, Stp2, Aro1, His4, Hom3, and Mae1.

[0198] Gpr1 (NM_{—}001180094.1) is a G-protein coupled receptor in the cAMP-PKA pathway. When sugar phosphates are present, it induces cAMP production in response to glucose (Rolland et al., FEMS Yeast Res, 2002).

[0199] Gpa2 (NM_{—}001178911.1) is a G-alpha subunit associated with Gpr1 in the cAMP-PKA pathway. When sugar phosphates are present, it induces cAMP production in response to glucose (Rolland et al., FEMS Yeast Res, 2002).

[0200] Ras2 (NM_{—}001182936.1) is a GTP binding protein that appears to play a role in the transcriptional changes that take place in the cell in response to glucose (Wang et al., PLOS Biology, 2004).

[0201] Stb3 (NM_{—}001180476.1) is a ribosomal RNA processing element (RRPE)-binding protein that represses transcription of growth genes. This repression is relieved by glucose (Liko et al., Genetics, 2010).

[0202] Hxk2 (NM_{—}001181119.1) is the predominant isoenzyme used during growth on glucose, fructose, and mannose. It is repressed by non-fermentable carbon sources. Hxk2 is necessary for a full transcriptional response to glucose and regulates its own expression. Hxk2-mediated transcriptional responses do not correlate to hexokinase activity of Hxk2, suggesting that the signaling and kinase activity of Hxk2 are distinct (Moreno and Herrero, FEMS Microbiol Rev, 2002).

[0203] Pfk27 (NM_{—}001183390.1) catalyzes the synthesis of fructose-2,6-bisphosphate, a second messenger that activates glycolysis and inhibits gluconeogenesis (Benanti, Nat Cell Biol, 2007). It is induced and stabilized by fermentable carbon sources. Pfk27 is phosphorylated by Snf1 and targeted for degradation by Grr1.

[0204] Pfk26 (NM_{—}001179455.1) catalyzes the synthesis of fructose-2,6-bisphosphate, a second messenger that activates glycolysis and inhibits gluconeogenesis.

[0205] Sch9 (NM_{—}0011799336.1) is a protein kinase involved in transcriptional activation of osmostress-responsive genes; regulates G1 progression, cAPK activity, nitrogen activation of the FGM pathway; involved in life span regulation; homologous to mammalian Akt/PKB.

[0206] Yak1 (NM_{—}001181574.1) is a serine-threonine protein kinase that is part of a glucose-sensing system involved in growth control in response to glucose availability; translocates from the cytoplasm to the nucleus and phosphorylates Pop2p in response to a glucose signal.

[0207] Mig1 (NM_{—}00180900.1) is a transcription factor involved in glucose repression; sequence specific DNA binding protein containing two Cys2His2 zinc finger motifs; regulated by the SNF1 kinase and the GLC7 phosphatase.

[0208] Rim15 (NM_{—}001179933.1) is a glucose-repressible protein kinase involved in signal transduction during cell proliferation in response to nutrients, specifically the establishment of stationary phase; identified as a regulator of IME2; substrate of Pho80p-Pho85p kinase.

[0209] Kcs1 (NM_{—}001180325.1) is an inositol hexakisphosphate (IP6) and inositol heptakisphosphate (IP7) kinase. Generation of high energy inositol pyrophosphates by Kcs1p is required for many processes such as vacuolar biogenesis, stress response and telomere maintenance.

[0210] Tps1 (NM_{—}00117874.1) is a synthase subunit of trehalose-6-phosphate synthase/phosphatase complex, which synthesizes the storage carbohydrate trehalose; also found in a monomeric form; expression is induced by the stress response and repressed by the Ras-cAMP pathway.

[0211] Altered Protein Activity Level

[0212] In host cells containing one or more glucose response genes, the activity level of one or more proteins encoded by the one or more glucose response genes may be altered compared to the wild-type activity level of the one or more proteins. The activity level of the one or more proteins may be increased or decreased compared to the wild-type activity level of the one or more protein.

[0213] Alterations in activity level of proteins can be achieved by genetic modifications of the host cell. Genetic modifications that result in an increase in gene expression or protein activity can be referred to as amplification, overproduction, overexpression, activation, enhancement, addition, or up-regulation of a gene. It may include increased expression and/or activity of the encoded proteins and includes higher activity or action of the proteins (e.g., specific activity or in vivo enzymatic activity), reduced inhibition or degradation of the proteins, and overexpression of the proteins. For example, gene copy number can be increased, expression levels can be increased by use of a promoter that gives higher levels of expression than that of the native promoter, or a gene can be altered by genetic engineering or classical mutagenesis to increase the biological activity of an enzyme or action of a protein. Mutations that cause a gene to be continuously expressed or that cause the encoded protein to be constitutively active are additional examples of genetic modifications that result in an increase in protein activity. Combinations of any of the modifications described above are also possible.

[0214] Genetic modifications that result in a decrease in gene expression or protein activity can be referred to as inactivation (complete or partial), deletion, interruption, blockage, silencing, down-regulation, or attenuation of expression of a gene. For example, a genetic modification in a gene which results in a decrease in the activity of the protein encoded by such gene, can be the result of a complete deletion of the gene (i.e., the gene does not exist, and therefore the protein does not exist), a mutation in the gene which results in incomplete or no translation of the protein (e.g., the protein is not expressed), or a mutation in the gene which decreases or abolishes the natural function of the protein (e.g., a protein is expressed which has decreased or no enzymatic activity or action). More specifically, reference to decreasing the action of proteins discussed herein generally refers to any genetic modification in the host cell in question, which results in decreased expression and/or biological activity of the proteins and includes decreased activity of the proteins, increased inhibition or degradation of the proteins, and reduction or elimination of expression of the proteins. For example, the action or activity of a protein can be decreased by blocking or reducing the production of the protein, reducing protein action, or inhibiting the action of the protein. Combinations of some of these modifications are also possible. Blocking or reducing the production of a protein can include placing the gene encoding the protein under the control of a promoter that requires the presence of an inducing compound in the growth medium. By establishing conditions such that the inducer becomes depleted from the medium, the expression of the gene encoding the protein (and therefore, of protein synthesis) could be turned off. Blocking or reducing the action of a protein could also include using an excision technology approach similar to that described in U.S. Pat. No. 4,743,546. To use this approach, the gene encoding the protein of interest is cloned between specific genetic sequences that allow specific, controlled excision of the gene from the genome. Excision could be prompted by, for example, a shift in the cultivation temperature of the culture, as in U.S. Pat. No. 4,743,546, or by some other physical or nutritional signal.

[0215] In general, according to the present disclosure, an alteration in the activity of a protein is made with reference to the same characteristic of a wild-type (i.e., normal, not modified) protein that is derived from the same organism (from the same source or parent sequence), which is measured or established under the same or equivalent conditions. Such conditions include the assay or culture conditions (e.g., medium components, temperature, pH, etc.) under which the activity of the protein is measured, as well as the type of assay used, the host cell that is evaluated, etc. As discussed above, equivalent conditions are conditions (e.g., culture conditions) which are similar, but not necessarily identical (e.g., some conservative changes in conditions can be tolerated), and which do not substantially change the effect on cell growth or biological activity as compared to a comparison made under the same conditions.

[0216] Pentose Transporters

[0217] Host cells of the present disclosure may further contain at least one recombinant pentose transporter, which allows the cells to utilize hemicellulosic pentose sugars for the production of hydrocarbons or hydrocarbon derivatives. A pentose transporter is any transmembrane protein that transports a pentose molecule from outside of the cell to the inside of the cell and/or from inside of the cell to outside of the cell. Pentose, as used herein, refers to any monosaccharide with five carbon atoms. Examples of pentoses include, without limitation, xylose, arabinose, mannose, galactose, and rhamnose.

[0218] In certain embodiments, a pentose transporter of the present disclosure is a functional fragment that maintains the ability to transport a pentose molecule from outside of the cell to the inside of the cell and/or from inside of the cell to outside of the cell.

[0219] Examples of suitable pentose transporters include, without limitation, those listed in Table 6.

TABLE 6
Pentose Transporters

| Gene Name | Organism | NCBI Reference Sequence |
|---|---|---|
| Ap31/SUT2 | P. stipitis | ABN66266 |
| Ap26/XP_001387242 | P. stipitis | XP 001387242 |
| AN49/NCU01494 | N. crassa | EAA2669I |
| AN41/NCU09287 | N. crassa | EAA28903 |
| AN29-2/NCU04963 | N. crassa | EAA30175 |
| AN28-3/NCU02188 | N. crassa | EAA30346 |
| AN25/NCU00821 | N. crassa | EAA35128 |
| Xy50/NCU04537 | N. crassa | EAA26741 |
| Xy31/NCU06138 | N. crassa | EAA30764 |
| Xy33/NCU00988 | N. crassa | EAA34662 |
| Xyp37/SUT3 | P. stipitis | ABN67990 |
| Xyp33/XUT3 | P. stipitis | EAZ63115 |
| Xyp32/XUTl | P. stipitis | ABN67554 |
| Xyp30/STLl | P. stipitis | ABN65745 |
| Xyp31/XUT2 | P. stipitis | AAVQOIOOOO02 |
| Xyp29/STLl2/XUT6 | P. stipitis | ABN68560 |
| Xyp30-1/HGT3 | P. stipitis | ABN68686 |
| Xyp28/XUT7 | P. stipitis | EAZ63044 |

[0220] In certain embodiments, the pentose transporter is a xylose transporter. Examples of suitable xylose transporters include, without limitation, those listed in Table 7.

TABLE 7
Xylose Transporters

| NCBI Reference | |
|---|---|
| Sequence | Organism |
| XP_002488227 | Talaromyces stipitatus |
| XP_001400900 | Aspergillus niger |
| XP_001220481 | Chaetomium globosum CBS 48.51 |
| XP_001912725 | Podospora anserina |
| XP_660079 | Aspergillus nidulans FGSC A4 |
| AAL89823 | Aspergillus niger |
| XP_002382573 | Aspergillus flavus NRRL3357 |
| XP_459386 | Debaryomyces hansenii CBS767 |
| XP_001825132 | Aspergillus oryzae RIB40 |
| XP_001389300 | Aspergillus niger |
| XP_457508 (DH61) | Debaryomyces hansenii CBS767 |
| XP_002551364 | Candida tropicalis MYA-3404 |
| XP_001523322 | Lodderomyces elongisporus NRRL |
| XP_720384 (29-4) | Candida albicans SC5314 |
| XP_456868 | Debaryomyces hansenii CBS767 |
| XP_001487429 (29-6) | Pichia guilliermondii ATCC 6260 |
| XP_961039 | Neurospora crassa |
| CAG88709 (DH48) | Debaryomyces hansenii CBS767 |
| XP_001727326 (29-9) | Aspergillus oryzae |
| XP_001816757 | Aspergillus oryzae |
| XP_457508 (DH61) | Debaryomyces hansenii CBS767 |
| XP_001727326 (29-9) | Aspergillus oryzae |
| XP_720384 (29-4) | Candida albicans SC5314 |
| XP_681669 (32-10) | Aspergillus nidulans FGSC A4 |
| XP_002488227 | Talaromyces stipitatus |
| AB070824.1 | Aspergillus oryzae |

[0221] In other embodiments, the pentose transporter is an arabinose transporter. Examples of suitable arabinose transporters include, without limitation, those listed in Table 8.

TABLE 8
Arabinose Transporters

| NCBI Reference | |
|---|---|
| Sequence | Organism |
| XP_002545773 | Candida tropicalis MYA-3404 |
| EEQ43601 | Candida albicans WO-1 |
| XP_001818631 | Aspergillus oryzae RIB40 |
| XP_002558275 | Penicillium chrysogenum Wisconsin 54-1255 |
| XP_001390883 | Aspergillus niger |
| XP_750103 | Aspergillus fumigatus Af293 |
| XP_960000 (NC52) | Neurospora crassa OR74A |
| XP_657854 (32-8) | Aspergillus nidulans FGSC A4 |
| XP_001825068 | Aspergillus oryzae RIB40 |
| XP_681669 (32-10) | Aspergillus nidulans FGSC |
| XP_002545773 | Candida tropicalis MYA-3404 |
| XP_657854 (32-8) | Aspergillus nidulans FGSC A4 |

[0222] In some embodiments, pentose transporters of the present disclosure include, without limitation, the xylose transporters NCU08221 and STL12/XUT6; the arabinose transporter XUT1; the arabinose/glucose transporter NCU06138; the xylose/glucose transporters SUT2, SUT3, and XUT3; the xylose/arabinose/glucose transporter NCU04963, homologs thereof; and orthologs thereof.

[0223] In other embodiments, host cells of the present disclosure further contain one or more recombinant enzymes involved in pentose utilization. The one or more enzymes may be endogenous or heterologous to the host cell. The one or more enzymes involved in pentose utilization may include, without limitation, L-arabinose isomerase, L-ribulokinase, L-ribulose-5-P 4 epimerase, xylose isomerase, xylulokinase, aldose reductase, L-arabitinol 4-dehydrogenase, L-xylulose reductase, and xylitol dehydrogenase in any combination. These enzymes may come from any organism that naturally metabolizes pentose sugars. Examples of such organisms include, without limitation, Kluyveromyces sp., Zymomonas sp., E. coli, Clostridium sp., and Pichia sp.

### Methods of Producing and Culturing Host Cells of the Present Disclosure

[0224] Other aspects of the present disclosure relate to the production of host cells containing one or more of a recombinant cellodextrin transporter, a recombinant cellodextrin phosphorylase, a recombinant β-glucosidase, a recombinant phosphoglucomutase, or a recombinant hexokinase. In certain embodiments, the host cell may further contain one or more glucose response genes of the present disclosure, one or more pentose transporters of the present disclosure, and/or one or more recombinant enzymes of the present disclosure involved in pentose utilization. Such host cells may be used to degrade cellodextrin and to produce hydrocarbons or hydrocarbon derivatives from cellodextrin.

[0225] Methods of producing and culturing host cells of the present disclosure may include the introduction or transfer of expression vectors containing recombinant polynucleotides into the host cell. Such methods for transferring expression vectors into host cells are well known to those of ordinary skill in the art. For example, one method for transforming E. coli with an expression vector involves a calcium chloride treatment where the expression vector is introduced via a calcium precipitate. Other salts, e.g., calcium phosphate, may also be used following a similar procedure. In addition, electroporation (i.e., the application of current to increase the permeability of cells to nucleic acid sequences) may be used to transfect the host cell. Also, microinjection of the nucleic acid sequences provides the ability to transfect host cells. Other means, such as lipid complexes, liposomes, and dendrimers, may also be employed. Those of ordinary skill in the art can transfect a host cell with a desired sequence using these or other methods.

[0226] The vector may be an autonomously replicating vector, i.e., a vector which exists as an extrachromosomal entity, the replication of which is independent of chromosomal replication, e.g., a plasmid, an extrachromosomal element, a minichromosome, or an artificial chromosome. The vector may contain any means for assuring self-replication. Alternatively, the vector may be one which, when introduced into the host, is integrated into the genome and replicated together with the chromosome(s) into which it has been integrated. Furthermore, a single vector or plasmid or two or more vectors or plasmids which together contain the total DNA to be introduced into the genome of the host, or a transposon may be used.

[0227] The vectors preferably contain one or more selectable markers which permit easy selection of transformed hosts. A selectable marker is a gene the product of which provides, for example, biocide or viral resistance, resistance to heavy metals, prototrophy to auxotrophs, and the like. Selection of bacterial cells may be based upon antimicrobial resistance that has been conferred by genes such as the amp, gpt, neo, and hyg genes.

[0228] Suitable markers for yeast hosts are, for example, ADE2, HIS3, LEU2, LYS2, MET3, TRP1, and URA3. Selectable markers for use in a filamentous fungal host include, but are not limited to, amdS (acetamidase), argB (ornithine carbamoyltransferase), bar (phosphinothricin acetyltransferase), hph (hygromycin phosphotransferase), niaD (nitrate reductase), pyrG (orotidine-5′-phosphate decarboxylase), sC (sulfate adenyltransferase), and trpC (anthranilate synthase), as well as equivalents thereof. Preferred for use in Aspergillus are the amdS and pyrG genes of Aspergillus nidulans or Aspergillus oryzae and the bar gene of Streptomyces hygroscopicus. Preferred for use in Trichoderma are bar and amdS.

[0229] The vectors preferably contain an element(s) that permits integration of the vector into the host's genome or autonomous replication of the vector in the cell independent of the genome.

[0230] For integration into the host genome, the vector may rely on the gene's sequence or any other element of the vector for integration of the vector into the genome by homologous or nonhomologous recombination. Alternatively, the vector may contain additional nucleotide sequences for directing integration by homologous recombination into the genome of the host. The additional nucleotide sequences enable the vector to be integrated into the host genome at a precise location(s) in the chromosome(s). To increase the likelihood of integration at a precise location, the integrational elements should preferably contain a sufficient number of nucleic acids, such as 100 to 10,000 base pairs, preferably 400 to 10,000 base pairs, and most preferably 800 to 10,000 base pairs, which are highly homologous with the corresponding target sequence to enhance the probability of homologous recombination. The integrational elements may be any sequence that is homologous with the target sequence in the genome of the host. Furthermore, the integrational elements may be non-encoding or encoding nucleotide sequences. On the other hand, the vector may be integrated into the genome of the host by non-homologous recombination.

[0231] For autonomous replication, the vector may further contain an origin of replication enabling the vector to replicate autonomously in the host in question. The origin of replication may be any plasmid replicator mediating autonomous replication which functions in a cell. The term “origin of replication” or “plasmid replicator” is defined herein as a sequence that enables a plasmid or vector to replicate in vivo. Examples of origins of replication for use in a yeast host are the 2 micron origin of replication, ARS1, ARS4, the combination of ARS1 and CEN3, and the combination of ARS4 and CEN6. Examples of origins of replication useful in a filamentous fungal cell are AMA1 and ANS1 (Gems et al., 1991; Cullen et al., 1987; WO 00/24883). Isolation of the AMA1 gene and construction of plasmids or vectors containing the gene can be accomplished according to the methods disclosed in WO 00/24883.

[0232] For other hosts, transformation procedures may be found, for example, in Jeremiah D. Read, et al., Applied and Environmental Microbiology, August 2007, p. 5088-5096, for Kluyveromyces; in Osvaldo Delgado, et al., FEMS Microbiology Letters 132, 1995, 23-26, for Zymomonas; in U.S. Pat. No. 7,501,275 for Pichia sipitis; and in WO 2008/040387 for Clostridium.

[0233] More than one copy of a gene may be inserted into the host to increase production of the gene product. An increase in the copy number of the gene can be obtained by integrating at least one additional copy of the gene into the host genome or by including an amplifiable selectable marker gene with the nucleotide sequence where cells containing amplified copies of the selectable marker gene, and thereby additional copies of the gene, can be selected for by cultivating the cells in the presence of the appropriate selectable agent.

[0234] The procedures used to ligate the elements described above to construct the recombinant expression vectors of the present disclosure are well known to one skilled in the art (see, e.g., Sambrook et al., 1989, supra).

[0235] The host cell is transformed with at least one expression vector. When only a single expression vector is used (without the addition of an intermediate), the vector will contain all of the nucleic acid sequences necessary.

[0236] Once the host cell has been transformed with the expression vector, the host cell is allowed to grow. Methods of the invention may include culturing the host cell such that recombinant nucleic acids in the cell are expressed. For microbial hosts, this process entails culturing the cells in a suitable medium. Typically cells are grown at 35° C. in appropriate media. Preferred growth media in the present invention include, for example, common commercially prepared media such as Luria Bertani (LB) broth, Sabouraud Dextrose (SD) broth or Yeast medium (YM) broth. Other defined or synthetic growth media may also be used and the appropriate medium for growth of the particular host cell will be known by someone skilled in the art of microbiology or fermentation science. Temperature ranges and other conditions suitable for growth are known in the art (see, e.g., Bailey and Ollis 1986).

[0237] According to some aspects of the present disclosure, the culture media contains a carbon source for the host cell. Such a “carbon source” generally refers to a substrate or compound suitable to be used as a source of carbon for prokaryotic or simple eukaryotic cell growth. Carbon sources can be in various forms, including, but not limited to polymers, carbohydrates, acids, alcohols, aldehydes, ketones, amino acids, peptides, etc. These include, for example, various monosaccharides such as glucose, oligosaccharides such as cellodextrins, polysaccharides, a biomass polymer such as cellulose or hemicellulose, xylose, arabinose, disaccharides, such as sucrose, saturated or unsaturated fatty acids, succinate, lactate, acetate, ethanol, etc., or mixtures thereof. The carbon source can additionally be a product of photosynthesis, including, but not limited to glucose.

[0238] Lignocellulosic biomass is composed of cellulose, hemicellulose, and lignin. In some embodiments, the carbon source is a biomass polymer such as cellulose or hemicellulose. A “biomass polymer” as described herein is any polymer contained in biological material. The biological material may be living or dead. A biomass polymer includes, for example, cellulose, xylan, xylose, hemicellulose, lignin, mannan, and other materials commonly found in biomass. Non-limiting examples of sources of a biomass polymer include grasses (e.g., switchgrass, Miscanthus), rice hulls, bagasse, cotton, jute, hemp, flax, bamboo, sisal, abaca, straw, leaves, grass clippings, corn stover, corn cobs, distillers grains, legume plants, sorghum, sugar cane, sugar beet pulp, wood chips, sawdust, and biomass crops (e.g., Crambe).

[0239] In addition to an appropriate carbon source, media must contain suitable minerals, salts, cofactors, buffers and other components, known to those skilled in the art, suitable for the growth of the cultures and promotion of the enzymatic pathways necessary for the fermentation of various sugars and the production of hydrocarbons and hydrocarbon derivatives. Reactions may be performed under aerobic or anaerobic conditions where aerobic, anoxic, or anaerobic conditions are preferred based on the requirements of the microorganism. As the host cell grows and/or multiplies, expression of the enzymes, transporters, or other proteins necessary for growth on various sugars or biomass polymers, sugar fermentation, or synthesis of hydrocarbons or hydrocarbon derivatives is affected.

### Methods of Co-Fermentation

[0240] Other aspects of the present disclosure relate to methods of co-fermenting cellulose-derived and hemicellulose-derived sugars. As used herein, co-fermentation refers to simultaneous utilization by a host cell of more than one sugar in the same vessel. The method includes the steps of providing a host cell, where the host cell contains a recombinant cellodextrin transporter of the present disclosure, and one or more of a recombinant cellodextrin phosphorylase of the present disclosure, a recombinant β-glucosidase of the present disclosure, a recombinant phosphoglucomutase of the present disclosure, or a recombinant hexokinase of the present disclosure; and culturing the host cell in a medium containing a cellulose-derived sugar and a hemicellulose-derived sugar under conditions whereby the host cell co-ferments the cellulose-derived sugar and the hemicellulose-derived sugar. Any host cell described herein and containing a recombinant cellodextrin transporter of the present disclosure, and one or more of a recombinant cellodextrin phosphorylase of the present disclosure, a recombinant β-glucosidase of the present disclosure, a recombinant phosphoglucomutase of the present disclosure, or a recombinant hexokinase of the present disclosure may be used. In certain embodiments, the host cell may further contain one or more glucose response genes of the present disclosure, one or more pentose transporters of the present disclosure, and/or one or more recombinant enzymes of the present disclosure involved in pentose utilization.

[0241] In certain embodiments, the host cell may also contain at least one recombinant pentose transporter and one or more recombinant enzymes involved in pentose utilization. Alternatively, the at least one pentose transporter and one or more enzymes involved in pentose utilization may be endogenous to the host cell. The one or more enzymes may include, without limitation, L-arabinose isomerase, L-ribulokinase, L-ribulose-5-P 4 epimerase, xylose isomerase, xylulokinase, aldose reductase, L-arabitinol 4-dehydrogenase, L-xylulose reductase, xylitol dehydrogenase, or any other pentose-utilizing enzymes known to one of skill in the art.

[0242] In methods of co-fermentation as described herein, cellulose-derived sugars may include, without limitation, cellobiose, cellotriose, cellotetraose, etc.; and hemicellulose-derived sugars may include, without limitation, xylose and arabinose. Typically, in order to prepare the cellulose-derived sugars and hemicellulose-derived sugars for co-fermentation by a host cell, lignocellulosic biomass is first pretreated to alter its structure and allow for better enzymatic hydrolysis of cellulose. Pretreatment may include physical or chemical methods, including, for example, ammonia fiber/freeze explosion, the lime method based on calcium or sodium hydroxide, and steam explosion with or without an acid catalyst. Acid treatment will release xylose and arabinose from the hemicellulose component of the lignocellulosic biomass. Next, preferably, the cellulose component of the pretreated biomass is hydrolyzed by a mixture of cellulases. Examples of commercially available cellulase mixtures include Celluclast 1.5L® (Novozymes), Spezyme CP® (Genencor) (Scott W. Pryor, 2010, Appl Biochem Biotechnol), and Cellulyve 50L (Lyven).

### Methods of Degrading Cellodextrin

[0243] Other aspects of the present disclosure provide methods for degrading cellodextrin in a host cell. In one aspect, the present disclosure provides a method of degrading cellodextrin, by providing a host cell containing two or more of a recombinant cellodextrin transporter of the present disclosure, a recombinant cellodextrin phosphorylase of the present disclosure, a recombinant β-glucosidase of the present disclosure, a recombinant phosphoglucomutase of the present disclosure, or a recombinant hexokinase of the present disclosure; and culturing the host cell in a medium containing cellodextrin or a source of cellodextrin, whereby cellodextrin is degraded. Any host cell described herein and containing two or more of a recombinant cellodextrin transporter of the present disclosure, a recombinant cellodextrin phosphorylase of the present disclosure, a recombinant β-glucosidase of the present disclosure, a recombinant phosphoglucomutase of the present disclosure, or a recombinant hexokinase of the present disclosure may be used. In certain embodiments, the host cell may further contain one or more glucose response genes of the present disclosure, one or more pentose transporters of the present disclosure, and/or one or more recombinant enzymes of the present disclosure involved in pentose utilization.

[0244] In some embodiments, the source of cellodextrin is lignocellulosic biomass, which contains cellulose, hemicellulose, and lignin. In other embodiments, the source of cellodextrin is hemicellulose. In certain preferred embodiments, the source of cellodextrin is cellulose. Typically, the cellodextrin is cellobiose, cellotriose, cellotetraose, cellopentose, or cellohexose. Transport of cellodextrin into the cell may be measured by any methods known to one of skill in the art, including the methods described in US 2011/0020910.

[0245] Culturing conditions sufficient for the host cell to degrade cellodextrin are well known in the art and include any suitable culturing conditions disclosed herein. Typically, in order to prepare the cellodextrin or source of cellodextrin contained in the culture medium for utilization by the host cell, lignocellulosic biomass is first pretreated to alter its structure and allow for better enzymatic hydrolysis of cellulose. Pretreatment may include physical or chemical methods, including, for example, ammonia fiber/freeze explosion, the lime method based on calcium or sodium hydroxide, and steam explosion with or without an acid catalyst. Next, preferably, the cellulose component of the pretreated biomass is hydrolyzed by a mixture of cellulases. Examples of commercially available cellulase mixtures include Celluclast 1.5L® (Novozymes), Spezyme CP® (Genencor) (Scott W. Pryor, 2010, Appl Biochem Biotechnol), and Cellulyve 50L (Lyven).

### Methods of Synthesis of Hydrocarbons or Hydrocarbon Derivatives

[0246] Further aspects of the present disclosure provide methods for producing hydrocarbons or hydrocarbon derivatives from cellodextrin.

[0247] As used herein, “hydrocarbons” are organic compounds consisting entirely of hydrogen and carbon. Hydrocarbons include, without limitation, methane, ethane, ethene, ethyne, propane, propene, propyne, cyclopropane, allene, butane, isobutene, butene, butyne, cyclobutane, methylcyclopropane, butadiene, pentane, isopentane, neopentane, pentene, pentyne, cyclopentane, methylcyclobutane, ethylcyclopropane, pentadiene, isoprene, hexane, hexene, hexyne, cyclohexane, methylcyclopentane, ethylcyclobutane, propylcyclopropane, hexadiene, heptane, heptene, heptyne, cycloheptane, methylcyclohexane. heptadiene, octane, octene, octyne, cyclooctane, octadiene, nonane, nonene, nonyne, cyclononane, nonadiene, decane, decene, decyne, cyclodecane, and decadiene.

[0248] As used herein, “hydrocarbon derivatives” are organic compounds of carbon and at least one other element that is not hydrogen. Hydrocarbon derivatives include, without limitation, alcohols (e.g., arabinitol, butanol, ethanol, glycerol, methanol, 1,3-propanediol, sorbitol, and xylitol); organic acids (e.g., acetic acid, adipic acid, ascorbic acid, citric acid, 2,5-diketo-D-gluconic acid, formic acid, fumaric acid, glucaric acid, gluconic acid, glucuronic acid, glutaric acid, 3-hydroxypropionic acid, itaconic acid, lactic acid, malic acid, malonic acid, oxalic acid, propionic acid, succinic acid, and xylonic acid); esters; ketones (e.g., acetone); aldehydes (e.g., furfural); amino acids (e.g., aspartic acid, glutamic acid, glycine, lysine, serine, and threonine); and gases (e.g., carbon dioxide and carbon monoxide).

[0249] In preferred embodiments, the hydrocarbons or hydrocarbon derivatives can be used as fuel. In particularly preferred embodiments, the hydrocarbon or hydrocarbon derivative is ethanol or butanol.

[0250] In some embodiments, the hydrocarbon or hydrocarbon derivative is ethanol. In certain embodiments, the ethanol is produced at a rate that ranges from at least 0.10 to at least 50 g/L-h, from at least 0.1 to at least 40 g/L-h, from at least 0.1 to at least 30 g/L-h, from at least 0.1 to at least 20 g/L-h, from at least 0.1 to at least 10 g/L-h, from at least 0.1 to at least 5 g/L-h, from at least 0.1 to at least 1 g/L-h, from at least 0.5 to at least 40 g/L-h, from at least 0.5 to at least 20 g/L-h, from at least 0.5 to at least 10 g/L-h, from at least 0.5 to at least 5 g/L-h, from at least 0.5 to at least 1 g/L-h, from at least 1 to at least 40 g/L-h, from at least 1 to at least 20 g/L-h, from at least 1 to at least 10 g/L-h, from at least 1 to at least 5 g/L-h, from at least 5 to at least 40 g/L-h, from at least 5 to at least 20 g/L-h, from at least 5 to at least 10 g/L-h, from at least 10 to at least 50 g/L-h, from at least 10 to at least 40 g/L-h, or from at least 10 to at least 20 g/L-h.

[0251] In other embodiments, the ethanol is produced at a rate of about 0.10, about 0.15, about 0.20, about 0.25, about 0.30, about 0.35, about 0.40, about 0.45, about 0.50, about 0.55, about 0.60, about 0.65, about 0.70, about 0.75, about 0.80, about 0.85, about 0.90, about 0.95, about 1.00, about 1.25, about 1.50, about 1.75, about 2.00, about 2.25, about 2.50, about 2.75, about 3.00, about 3.25, about 3.50, about 3.75, about 4.00, about 4.25, about 4.50, about 4.75, about 5.00, about 5.25, about 5.50, about 5.75, about 6.00, about 6.25, about 6.50, about 6.75, about 7.00, about 7.25, about 7.50, about 7.75, or about 8.00, about 8.25, about 8.50, about 8.75, about 9.00, about 9.25, about 9.50, about 9.75, about 10, about 10.5, about 11, about 11.5, about 12, about 12.5, about 13, about 13.5, about 14, about 14.5, about 15, about 15.5, about 16, about 16.5, about 17, about 17.5, about 18, about 18.5, about 19, about 19.5, about 20, about 20.5, about 21, about 21.5, about 22, about 22.5, about 23, about 23.5, about 24, about 24.5, about 25, about 25.5, about 26, about 27, about 28, about 29, about 30, about 35, about 40, about 45, about 50, or more g/L-h. It should be noted that the rates of ethanol production described herein may vary by ±0.02 g/L-h. For example a rate of about 10 g/L-h could vary from 9.98 g/L-h to 10.02 g/L-h.

[0252] According to one aspect of the present disclosure, a method for producing hydrocarbons or hydrocarbon derivatives from cellodextrin, includes the steps of providing a host cell containing two or more of a recombinant cellodextrin transporter of the present disclosure, a recombinant cellodextrin phosphorylase of the present disclosure, a recombinant β-glucosidase of the present disclosure, a recombinant phosphoglucomutase of the present disclosure, or a recombinant hexokinase of the present disclosure; and culturing the host cell in a medium containing cellodextrin or a source of cellodextrin, whereby the host cell produces hydrocarbons or hydrocarbon derivatives from the cellodextrin. Any host cell described herein and containing two or more of a recombinant cellodextrin transporter of the present disclosure, a recombinant cellodextrin phosphorylase of the present disclosure, a recombinant β-glucosidase of the present disclosure, a recombinant phosphoglucomutase of the present disclosure, or a recombinant hexokinase of the present disclosure may be used. In certain embodiments, the host cell may further contain one or more glucose response genes of the present disclosure, one or more pentose transporters of the present disclosure, and/or one or more recombinant enzymes of the present disclosure involved in pentose utilization.

[0253] In some embodiments, the source of cellodextrin is lignocellulosic biomass, which contains cellulose, hemicellulose, and lignin. In other embodiments, the source of cellodextrin is hemicellulose. In certain preferred embodiments, the source of cellodextrin is cellulose. Typically, the cellodextrin is cellobiose, cellotriose, cellotetraose, cellopentose, or cellohexose.

### Methods of Reducing ATP Consumption During Glucose Utilization

[0254] Other aspects of the present disclosure provide methods for reducing ATP consumption during glucose utilization in a host cell. In one aspect, the present disclosure provides a method for reducing ATP consumption during glucose utilization, by providing a host cell containing one or more of a recombinant cellodextrin transporter of the present disclosure, a recombinant phosphoglucomutase of the present disclosure, or a recombinant hexokinase of the present disclosure, and containing a recombinant polypeptide containing Y-x(2)-G-x-[KR]-E-N-[AG]-[AG]-[IV]-F-x(2)-[ANST]-[NST]-x(2)-[AIV]-x(2)-[AGT]-x(4)-[AG]-x(4)-[ADNS] (SEQ ID NO: 233), Y-Q-[CN]-M-[IV]-T-F-[CN]-[FILMV]-[AS]-R-[ST]-[AS]-S-[FY]-[FY]-E-[STV]-G-x-[GS]-R-G-[IM]-G-F-R-D-S-[ACNS]-Q-D-[ILV]-[ILMV]-G-x-V-H-x-[IV]-P-[ADEST]-x-[AV]-[KR]-[AEQ]-x-[IL]-[FIL]-D (SEQ ID NO: 14), or G-x(2)-[FY]-x-N-[AGS]-x-[AS]-W-[APS]-V-[IL]-[AS]-x(2)-A-x(2)-[DE]-x-[AI]-x(3)-[LMV]-[DEN]-[ASV]-[ILV]-x(3)-L-x-T-x(2)-G-[ILV]-x(2)-[SV]-x-P-[AG] (SEQ ID NO: 15), where the recombinant polypeptide has cellodextrin phosphorylase activity; and culturing the host cell in a medium containing cellodextrin or a source of cellodextrin, whereby cellodextrin is degraded by the recombinant polypeptide to glucose-1-phosphate, where the production of glucose-1-phosphate from cellodextrin reduces ATP consumption as compared to a corresponding cell lacking the recombinant polypeptide. Any host cell described herein and containing one or more of a recombinant cellodextrin transporter of the present disclosure, a recombinant phosphoglucomutase of the present disclosure, or a recombinant hexokinase of the present disclosure together with a recombinant cellodextrin transporter of the present disclosure may be used. In certain embodiments, the host cell may further contain one or more glucose response genes of the present disclosure, one or more pentose transporters of the present disclosure, and/or one or more recombinant enzymes of the present disclosure involved in pentose utilization.

[0255] Host cells containing a recombinant polypeptide having cellodextrin phosphorylase activity reduced ATP consumption; as the cellodextrin phosphorylase utilizes inorganic phosphate to phosphorolytic cleave cellodextrin to glucose-1-P, which can then be converted to glucose-6-phosphate by a phosphoglucomutase. In contrast, hydrolytic pathways for degrading cellodextrin, such as those that utilize a β-glucosidase, produce glucose, which then needs to be converted to glucose-6-phosphate by utilizing ATP as a phosphate donor. Thus, utilizing a cellodextrin phosphorylase saves 1 ATP equivalent per cleavage reaction, which reduces the amount of ATP that must be consumed to phosphorylate cellodextrin-derived glucose before it is utilized via glycolysis. ATP consumption may be measured by any methods known to one of skill in the art, and include any suitable methods disclosed herein.

[0256] In some embodiments, the source of cellodextrin is lignocellulosic biomass, which contains cellulose, hemicellulose, and lignin. In other embodiments, the source of cellodextrin is hemicellulose. In certain preferred embodiments, the source of cellodextrin is cellulose. Typically, the cellodextrin is cellobiose, cellotriose, cellotetraose, cellopentose, or cellohexose.

[0257] It is to be understood that, while the present disclosure has been described in conjunction with the preferred specific embodiments thereof, the foregoing description is intended to illustrate and not limit the scope of the present disclosure. Other aspects, advantages, and modifications within the scope of the present disclosure will be apparent to those skilled in the art to which the present disclosure pertains.

[0258] The following examples are offered to illustrate provided embodiments and are not intended to limit the scope of the present disclosure.

### EXAMPLES

### Example 1

### Introduction

[0259] There is considerable interest in engineering microbes to convert the sugars found in plant cell walls to fuels and other chemicals. Plant cell walls are composed of cellulose (a polymer of glucose), hemicellulose (a heterogeneous polymer of pentoses, hexoses and sugar acids), and lignin (a heterogeneous phenolic polymer). They are abundant in agricultural and municipal wastes, and in dedicated energy crops. The yeast, Saccharomyces cerevisiae, is a favored platform for these engineering efforts because it is robust, simple to manipulate genetically, and capable of high carbon fluxes. Despite this, S. cerevisiae has a number of deficiencies including an inability to naturally ferment pentose sugars, sensitivity to solvents, and sensitivity to inhibitory compounds found in deconstructed plant material.

[0260] Another deficiency is that S. cerevisiae does not naturally ferment cellodextrins such as cellobiose. Cellodextrins are short polymers of β (1→4) linked glucose, are the repeating unit of cellulose, and are produced by the enzymatic digestion of cellulose by cellulases. To allow cellodextrin consumption, S. cerevisiae has been modified to either secrete or surface-display a f-glucosidase to hydrolyze cellodextrins to glucose extracellularly; or to import cellodextrins with a cellodextrin transporter for intracellular hydrolysis by a β-glucosidase.

[0261] In the two hydrolytic pathways, the o-glycosidic linkages of cellodextrins are cleaved by hydrolases and H₂O to produce glucose; while in the phosphorolytic pathway they are cleaved by phosphorylases and inorganic phosphate (Pᵢ) to produce glucose and glucose-1-phosphate. This difference is significant, because the first step of the Embden-Meyerhof glycolytic pathway consumes ATP to phosphorylate glucose. Thus the phosphorolytic pathway may be preferable when ATP is in short supply because less ATP is consumed for glucose phosphorylation.

[0262] Pathways with low ATP demands may be preferable for fuel and chemical production from lignocellulosic substrates. Lignocellulose is commonly treated with dilute acid to hydrolyze hemicellulose and liberate cellulose from lignin. Enzymatic hydrolysis of cellulose results in a low pH hydrolyzate containing not only hexose and pentose sugars, but also high concentrations of hemicellulose-derived acetic acid. At low pH, acetic acid moves freely across the plasma membrane of S. cerevisiae and into the cytosol, where it deprotonates into acetate. To maintain homeostasis, the dissociated proton and acetate must be exported through the membrane-bound H⁺ pump, Pma1, and the weak acid efflux pump, Pdr12, both of which consume ATP.

[0263] Accordingly, the following Example compares the performance of two cellobiose fermentation pathways that differ only in the mechanism by which imported cellobiose is cleaved (FIG. 2). The first pathway employs an intracellular hydrolytic enzyme, while the second pathway employs an intracellular phosphorolytic enzyme (FIG. 2).

[0264] Materials and Methods

[0265] Cellobiose Phosphorylase and Phosphoglucomutase Cloning

[0266] Cellobiose phosphorylase (CBP) genes from Celvibrio gilvus (CgCBP, Accession: AB010707), Sacharophagus degradans (SdCBP, Accession: YP_{—}526792), and Clostridium thermocellum (CtCBP, Accession: YP_{—}001036707) were codon-optimized, and synthesized by DNA2.0. The genes were inserted between the restriction sites SpeI and PstI in the 2μ plasmid pRS425, which had been previously modified to include the S. cerevisiae PGK1 promoter and the Cyc transcriptional terminator (PGK1_pRS426).

[0267] The C. gilvus CBP gene was inserted into the PGK1_pRS426 plasmid to create the plasmid PGK1_CgCBP_{—}425. The C. gilvus CBP gene was inserted using the following primers:

(SEQ ID NO: 201)
5′-TTA CTA GTA TGG GAT CAT CTC ACC ACC-3′;
and
(SEQ ID NO: 202)
5′-ATT CTG CAG TTA ATG ATG ATG ATG ATG ATG TAC TGT
CAC TTC GAC TCT CAC AGT AG-3′

[0268] The S. degradans CBP gene was inserted into the PGK1_pRS426 plasmid to create the plasmid PGK1_SdCBP_{—}425. The S. degradans CBP gene was inserted using the following primers:

(SEQ ID NO: 203)
5′-TTA CTA GTA TGA AAT TCG GGC ACT TTG-3′;
and
(SEQ ID NO: 204)
5′-ATT CTG CAG TTA ATG ATG ATG ATG ATG ATG TCC AAG
TGT TAC CTC GAC ATT G-3′

[0269] The C. thermocellum CBP gene was inserted into the PGK1_pRS426 plasmid to create the plasmid PGK1_CtCBP_{—}425. The C. thermocellum CBP gene was inserted using the following primers:

(SEQ ID NO: 205)
5′-TTA CTA GTA TGA AGT TTG GCT TTT TCG ATG-3′;
and
(SEQ ID NO: 206)
5′-ATT CTG CAG TTA ATG ATG ATG ATG ATG ATG TCC AAG
TGT TAC CTC GAC ATT G-3′

[0270] For all primers disclosed herein, restriction sites are underlined, and 6×-hisitidine tags are italicized.

[0271] To construct plasmids containing both a CBP gene and the S. cerevisiae phosphoglucomutase gene, Pgm2 (Accession: CAA89741) was first cloned between the SpeI and PstI restriction sited in the plasmid PGK1_pRS426 to create the plasmid PGK1_PGM_{—}425. The Pgm2 gene was inserted using the following primers:

(SEQ ID NO: 207)
5′-TTACTAGTATGTCATTTCAAATTGAAACGGTTC-3′;
and
(SEQ ID NO: 208)
5′-ATTCTGCAGTTAAGTACGAACCGTTGGTTCTTC-3′

[0272] The Pgm2 gene bracketed by the PGK1 promoter and the Cyc transcriptional terminator was then amplified from PGK1_PGM_{—}425 plasmid using the following primers:

(SEQ ID NO: 209)
5′-ATGAGCTCTGAATAATACGACTCACTATAGGGCGAATTG-3′;
and
(SEQ ID NO: 210)
5′-ATGAGCTCTGAATGGAAACAGCTATGACCATGATTACG-3′

[0273] This fragment was then inserted into the SacI restriction site of the PGK1_SdCBP_pRS425 plasmid, the PGK1_CgCBP_{—}425 plasmid, and the PGK1_CtCBP_{—}425 plasmid; creating the plasmids PGK1_SdCBP_PGM_{—}425, PGK1_CgCBP_PGM_{—}425, and PGK1_CtCBP_PGM_{—}425.

[0274] S. cerevisiae Strain Construction and Growth

[0275] To create the yeast strains used in this study, plasmids were transformed into the S. cerevisiae strain D452-2 (MATα leu2 his3 ura3 can1) (Hosaka, 1992) using the yeast EZ-Transformation kit (BIO 101, Vista, Calif.). To select transformants using an amino acid auxotrophic marker, yeast synthetic complete (YSC) medium was used, which contained 6.7 g/L yeast nitrogen base plus 20 g/L glucose, 20 g/L agar, and CSM-Leu-Trp-Ura-His (Bio 101, Vista, Calif.). This medium supplied the appropriate nucleotides and amino acids.

[0276] Fermentation

[0277] A single colony from YSC plates was grown overnight in 5 mL of YP medium (10 g/L yeast extract and 20 g/L peptone) containing 20 g/L of cellobiose. Cells at mid-exponential phase were harvested and inoculated after washing twice by sterilized water. All of the flask fermentation experiments were performed using 50 mL of YP medium containing 80 g/L of cellobiose in 250 mL flask at 30° C. with initial OD₆₀₀ of ˜1.0 and under oxygen limited conditions. Cell growth was monitored by optical density (OD) at 600 nm using UV-visible Spectrophotometer (Biomate 5, Thermo, N.Y.). Ethanol, acetate, glucose, and glycerol concentrations were determined by high performance liquid chromatography (HPLC, Agilent Technologies 1200 Series) equipped with a refractive index detector using a Rezex ROA-Organic Acid H+ (8%) column (Phenomenex Inc., Torrance, Calif.). The column was eluted with 0.005 N of H₂SO₄ at a flow rate of 0.6 ml/min at 50° C.

[0278] Directed Evolution of Phosphorolytic Strains

[0279] A fermentation reaction was started as described above using the D452-2 strain of S. cerevisiae transformed with cdt-1 and the S. degradans CBP. When cellobiose concentrations reached almost zero, cells were collected and used to establish new reactions at an OD (600 nm) of ˜0.01. This process was repeated 7 times over the course of 30 days. At this point, cells were plated onto YSC plates containing 20 g/L of cellobiose to isolate clones. After the confirmation of improved phenotypes from isolated clones, plasmids were isolated from one of representative clone and sequenced.

[0280] Site Directed Mutagenesis and Transporter Kinetics

[0281] Site directed mutagenesis was performed using the Quickchange® protocol (Zheng et al., Nucleic Acids Res. 2004 Aug. 10; 32(14):e115). The primers used to introduce each mutation are listed in Table 9. Transporter kinetics were measured as described previously with slight modifications (Galazka et al., Science. 2010 Oct. 1; 330(6000):84-6. Epub 2010 Sep. 9). Briefly, the yeast strain D452-2 transformed with mutant transporters was set-up at an OD (600 nm) of −0.2 in 50 mL of DOB-uracil and grown to an OD (600 nm) of ˜1. Cells were then harvested by centrifugation, washed 3× with 10 mLs of transport buffer (30 mM MES-NaOH [pH 5.6], 50 mM EtOH), and resuspended to a final OD (600 nm) of ˜40 in transport buffer. The GFP fluorescence of 100 μL of these cells was determined with excitation/emission wavelengths of 485/535 nm Beckman Coulter Paradigm™ plate reader. To record linear rates of uptake over the course of 95 seconds, 50 μL of cells were added to 50 μL of [³H]-cellobiose at the appropriate concentration with a final S.A. of 40 μCi/μmol in transport buffer layered over 100 μL of silicone oil (Sigma 85419). Reactions were stopped by spinning cells through the oil for 1 minute at 17,000 g, tubes were frozen in ethanol/dry ice, and tube-bottoms containing the cell-pellets were clipped off into 1 mL of 0.5 M NaOH. The pellets were solubilized overnight, 5 mL of Ultima Gold scintillation fluid added, and CPM determined in a Tri-Carb 2900TR scintillation counter. [³H]-cellobiose was purchased from Moravek Biochemicals, Inc., and had a specific activity of 4 Ci/mmol and a purity of >99%. Vₘₐₓ and K_{M} values were determined by fitting a single rectangular, 2-parameter hyperbolic function to a plot of rates vs. cellobiose concentration by non-linear regression in SigmaPlot®.

TABLE 9

| | Sense primer | Antisense primer |
|---|---|---|
| Mutation | (Mutated codon in lowercase) | (Mutated codon in lowercase) |
| F213L | TCTACAACTGCGGTTGGttaGGAGGTTCGA | GGAATCGAACCTCCtaaCCAACCGCAGTTGT |
| | TTCC (SEQ ID NO: 211) | AGA (SEQ ID NO: 212) |
| G91A | TGCGCCAACGGTTACGATgcaTCACTCATG | GATGATTCCGGTCATGAGTGAtgcATCGTAA |
| | ACCGGAATCATC (SEQ ID NO: 213) | CCGTTGGCGCA (SEQ ID NO: 214) |
| F335A | GGTGCTCATGATCTCCATCgcaGGCCAGTT | GTTGCCGGAGAACTGGCCtgcGATGGAGATC |
| | CTCCGGCAAC (SEQ ID NO: 215) | ATGAGCACC (SEQ ID NO: 216) |
| Q104A | ATCATCGCTATGGACAAGTTCgcaAACCAA | GTCACCAGTGTGGAATTGGTTtgcGAACTTG |
| | TTCCACACTGGTGAC (SEQ ID NO: 217) | TCCATAGCGATGAT (SEQ ID NO: 218) |
| F170A | TCCTCCAAGCTCGCTCAGgcaGTCGTTGGC | AACGAAGCGGCCAACGACtgcCTGAGCGAG |
| | CGCTTCGTT (SEQ ID NO: 219) | CTTGGAGGA (SEQ ID NO: 220) |
| R174A | GCTCAGTTTGTCGTTGGCgcaTTCGTTCTTG | ACCGAGGCCAAGAACGAAtgcGCCAACGAC |
| | GCCTCGGT (SEQ ID NO: 221) | AAACTGAGC (SEQ ID NO: 222) |
| E194A | GCCCCGGCCTACTCCATCgcaATCGCCCCT | CCAGTGAGGAGGGGCGATtgcGATGGAGTA |
| | CCTCACTGG (SEQ ID NO: 223) | GGCCGGGGC (SEQ ID NO: 224) |

[0282] Measurement of GFP Fluorescence During Fermentations

[0283] During fermentation, when OD (600 nm) reached 10.0, cells were harvested and washed twice by sterilized water. 200 μL of the cell suspension was transferred to a Corning black 96-well optical bottom plate (Corning, N.Y.). Fluorescence intensities were measured with a Biotek Synergy HT spectrophotometer (Biotek, Winooski, Vt.) at an excitation wavelength of 485 nm, emission of 528 nm.

[0284] Measurement of Enzymatic Activity in Cell Extracts

[0285] Fermentation reactions were set-up as described above in either YPC80 or YPD80 medium (10 g/L yeast extract, 20 g/L peptone, 80 g/L glucose). At an OD (600 nm) of ˜10, which corresponds to the exponential phase of the reaction, 2 mL of the culture was removed and cells pelleted. The cell pellet was washed 2× in 500 μL of ice-cold extraction buffer (50 mM HEPES-NaOH [pH 6.0], 2 mM DTT, and Roche Complete EDTA-free Protease Inhibitor Cocktail), and resuspended in 200 μL of this buffer, this was moved to a screw-cap tube containing ˜100 μL of 0.4 mm Zirconia/Silica beads. Cells were then lysed by bead-beating 3× for 30 s at 4° C. using a Biospec Products Mini-BEADBEATER WITH 30 s pause between runs. Debris was then pelleted, and the concentration of protein in the supernatant determined by the Bradford assay using reagents and the microtiter plate protocol from Bio-Rad.

[0286] The amount of cellobiase activity in cell extracts was determined by the Glucose oxidase/Peroxidase assay. 10 μg of cell extract was added to 1 mL of an assay mixture consisting of 50 mM phosphate buffer [pH 6.0], 10 U glucose oxidase, 10 U peroxidase, 1 mM o-dianisidine, and 10 mM cellobiose. The number of pmol of glucose produced per second was calculated by multiplying the rate of increase at 436 nm by 1.17×10³, a conversion that was established from a glucose standard curve.

[0287] The amount of hexokinase activity in cell extracts was determined by coupling the production of glucose-6-phosphate to the reduction of NADP⁺ by glucose-6-phosphate dehydrogenase. 10 μg of cell extract was added to 1 mL of an assay mixture consisting of 50 mM Tris-HCl [pH 8.0 at 30° C.], 13.3 mM MgCl₂, 540 μM ATP, 20 μM NADP⁺, 1 U S. cerevisiae glucose-6-phosphate dehydrogenase, and 112 mM glucose. The number of pmol of glucose-6-phosphate produced per second was calculated by multiplying the rate of increase at 340 nm by 1.85×10³, a conversion that was established from a glucose-6-phosphate standard curve.

[0288] Purification of GH1-1, SdCBP, Hxk1, Hxk2, and Glk1

[0289] GH1-1 and SdCBP were purified directly from the D452-2 yeast strains described above. 200 mL cultures in DOB-uracil-leucine were grown to an OD (600 nm) of ˜7. Cells were pelleted and washed 1× with 40 mL ddH₂O. Cell pellets were resuspended in 25 mL of 50 mM NaH₂PO₄ [pH 8.0], 300 mM NaCl, 10 mM imidazole, 2 mM DTT, and Roche Complete EDTA-free Protease Inhibitor Cocktail, and lysed by passage through an Avestin EmulsiFlex C-3 homogenizer at 20,000 P.S.I. Cell debris was then pelleted, and proteins purified using Nickel-NTA agarose beads from Qiagen following the protocol for native batch purification provided by Qiagen. Protein eluted from the beads was buffer exchanged into a buffer consisting of phosphate buffered saline (PBS), 10% glycerol, and 2 mM DTT, snap-frozen in (1)N₂ and stored at −80° C. Protein concentrations were determined by the absorbance at 280 nm using extinction coefficients of 108750 M⁻¹ cm⁻¹ and 178540 M⁻¹ cm⁻¹, for GH1-1 and SdCBP, respectively.

[0290] The Hxk1 (Accession: NP_{—}116711), Hxk2 (Accession: NP_{—}011261), and Glk1 (Accession: NP_{—}009890) genes were expressed and purified in E. coli. First, the genes were cloned into the PmlI and XhoI restriction sites of the expression plasmid pET302. Hxk1 gene was amplified using the following primers:

(SEQ ID NO: 225)
5′-CAT TAA CAC GTG GTT CAT TTA GGT CCA AAG AAA CCA
C-3′; and
(SEQ ID NO: 226)
5′-CAT TAA CTC GAG CAA TGA TAC CAA GAG ACT TAC CTT
CG-3′

[0291] The Hxk2 gene was amplified using the following primers:

(SEQ ID NO: 227)
5′-CAT TAA CAC GTG GTT CAT TTA GGT CCA AAA AAA CCA
C-3′; and
(SEQ ID NO: 228)
5′-CAT TAA CTC GAG TTA AGC ACC GAT GAT ACC AAC
G-3′

[0292] The Glk1 gene was amplified using the following primers:

(SEQ ID NO: 229)
5′-CAT TAA CAC GTG TCA TTC GAC GAC TTA CAC AAA
GC-3′; and
(SEQ ID NO: 230)
5′-CAT TAA CTC GAG TCA TGC TAC AAG CGC ACA
C-3′

[0293] These constructs were transformed into the BL21(DE3) strain of E. coli, and the proteins were expressed and purified using Nickel-NTA agarose beads from Qiagen following the protocol for native batch purification provided by Qiagen. Protein eluted from the beads was buffer exchanged into a buffer consisting of 50 mM Tris-HCl [pH 8.0 at 30° C.], 13.3 mM MgCl₂, 2 mM DTT, and 10% glycerol, snap-frozen in (1)N₂ and stored at −80° C. Protein concentrations were determined by the absorbance at 280 nm using extinction coefficients of 45840 M⁻¹ cm⁻¹, 45840 M⁻¹ cm⁻¹ and 30370 M⁻¹ cm⁻¹, for Hxk1, Hxk2 and Glk1, respectively.

[0294] Transglycosylation Activity of GH1-1 and SdCBP

[0295] To measure the transglycosylation activity of GH1-1 and SdCBP, 100 nkat of each enzyme was incubated at 37° C. with 100 μL 20% (w/v) cellobiose in 50 mM phosphate buffer [pH 6.0] and 2 mM DTT. After 12 hours, reactions were quenched in 400 μL 0.1 M NaOH and analyzed by ion chromatography with a Dionex ICS-3000, using a CarboPac PA200 column. Peaks were detected with an electrochemical detector.

[0296] Kinetic Parameters of GH1-1 and SdCBP

[0297] The kinetic parameters of purified GH1-1 and SdCBP were determined by measuring the rate of glucose production at a variety of cellobiose concentrations using the glucose oxidase/peroxidase assay in a manner identical to that used on cell extracts detailed above. A 1 mL assay included either 8.75 μmol of GH1-1 or 20 μmol SdCBP. Vₘₐₓ and K_{M} values were determined by fitting a single rectangular, 2-parameter hyperbolic function to a plot of glucose production rates vs. cellobiose concentration by non-linear regression in SigmaPlot®.

[0298] Effect of Cellobiose on S. cerevisiae Hexokinases

[0299] To measure the effect of high concentrations of cellobiose on the activity of purified Hxk1p, Hxk2p, and Glk1p, the activity of the purified proteins was measured in the presence or absence of 184 mM cellobiose, by coupling the production of glucose-6-phosphate to NADP⁺ reduction through glucose-6-phosphate dehydrogenase in a manner identical to that used on cell extracts detailed above. Between 1 and 10 μmol of Hxk1, Hxk2, or Glk1 was used.

[0300] Results

[0301] Yeast Strains Expressing a Cellobiose Phosphorylase and a Cellodextrin Transporter

[0302] Cellobiose phosphorylase (CBP) genes from Saccharophagus degradans (SdCBP), Celvibrio gilvus (CgCBP), and Clostridium thermocellum (CtCBP) were codon optimized, synthesized and cloned into 2μ plasmids. These plasmids were transformed, along with a plasmid carrying the GFP-tagged cellodextrin transporter gene cdt-1, into S. cerevisiae strain D452-2.

[0303] All three resulting strains consumed cellobiose and produced ethanol (FIG. 3). The cellobiose consumption rate of each of the three engineered strains was similar, ranging from about 0.95 to about 1.02 g/L-h. The ethanol production rates of the three strains were also similar, ranging from about 0.42 to about 0.44 g/L-h. After 77 hours, almost all of the cellobiose was fermented to ethanol by each of the three strains with a yield ranging from about 0.43 to about 0.45 g/g. Moreover, there was no appreciable accumulation of acetate, glucose, or glycerol.

[0304] Previously developed cellobiose-transporting yeast strains that rely on intracellular hydrolysis by β-glucosidase, ferment cellobiose with a concomitant accumulation of glucose and cellodextrins (e.g., cellotriose and cellotetraose) in the extracellular media. However, this phenomenon was not observed with the three yeast strains expressing a cellobiose phosphorylase rather than the β-glucosidase.

[0305] Ectopic Expression of Phosphoglucomutase

[0306] Cellobiose phosphorylase phosphorolytically cleaves cellobiose to glucose and glucose-1-phosphate, and glucose-1-phosphate needs to be converted to glucose-6-phosphate by a phosphoglucomutase (PGM) to enter the glycolytic pathway. As PGM is transcriptionally downregulated during glycolytic growth, a set of yeast strains in which the PGM of S. cerevisiae was expressed ectopically along with CDT-1 and CBP was tested to determine whether ectopic expression of PGM increases ethanol production. However, these strains showed slightly reduced performance compared to corresponding yeast strains that did not ectopically express PGM (FIG. 4).

[0307] Improved Phosphorolytic Yeast Strains

[0308] To improve upon the fermentation results of the engineered yeast strains expressing a cellodextrin transporter and a cellobiose phosphorylase, the strain expressing CDT-1 and SdCBP was enriched by serial transfer to YP medium containing 80 g/L of cellobiose for 30 days. An improved strain emerged that consumed cellobiose and produced ethanol 2-times faster than the parental strain. The ethanol productivity by evolved strain was 1.00 g/L-h while the parental strain exhibited 0.40 g/L-h of ethanol productivity.

[0309] In order to identify the mutations responsible for the improved yeast strain, both 2μ plasmids (pRS425-SdCBP and pRS426-CDT-1) were isolated from the evolved strain and sequenced. The sequencing identified a single nucleotide mutation (C 639A) in the cdt-1 open reading frame, corresponding to a change of phenylalanine to leucine at position 213 (F213L) in the translated polypeptide. This single mutation is responsible for the improved performance, as retransforming the isolated plasmid into the native D452-2 yeast strain recapitulated the result (FIG. 5). The strains expressing the mutant CDT-1(F213L) and SdCBP consumed cellobiose at a rate of 2.06±0.04 g/L-h, and produced ethanol at a rate 0.90±0.01 g/L-h (FIG. 5B). This is an improvement of 102% in the cellobiose production rate and an improvement of 105% in the ethanol production rate. Ethanol yields were unaffected, and there was no appreciable accumulation of, acetate, glucose, glycerol, or cellodextrins.

[0310] Mutant CDT-1 (F213L) Expression in Conjunction with β-Glucosidase Expression

[0311] Strains expressing CDT-1 with an intracellular β-glucosidase were previously shown to ferment cellobiose to ethanol. In order to assess whether the mutant CDT-1 (F213L) would also improve the performance of such a strain, the mutant CDT-1 (F213L) was expressed in D452-2 along with the intracellular β-glucosidase GH1-1. Only a slight improvement in cellobiose fermentation was seen compared to a strain expressing WT CDT-1 and GH1-1 (FIGS. 5C and 5D).

[0312] As previously reported (Ha et al., Proc Natl Acad Sci USA. 2011 Feb. 15; 108(7):2735-40. Epub 2011 Jan. 31), cellobiose fermentation by strains expressing CDT-1 and GH1-1 occurs with an accumulation of glucose and cellodextrins, and the same pattern was seen in the strain expressing GH1-1 and CDT-1 F213L.

[0313] Cellodextrin Transporter Mutants

[0314] In order to determine whether other CDT-1 mutants have a similar affect on cellobiose fermentation, seven formerly identified alanine mutants were tested. It was previously observed that expression of each these transporter mutants in combination with the β-glucosidase GH1-1 allow S. cerevisiae to grow at different rates on cellobiose. Compared to expression of wild-type CDT-1, expression of the transporter mutants G91A and F335A resulted in faster growth rates, expression of the transporter mutants Q104A and F170A resulted in intermediate growth rates, expression of and the transporter mutants E194A and R174A resulted slow growth rates (FIG. 6A).

[0315] Fermentation rates of yeast strains expressing each of the seven transporters in combination with GH1-1 followed this same trend with G91A>F335A>F213L>WT>F170A>Q104A>R174A>E194A (FIGS. 6A, 7, and Table 10). However, a different trend was observed in strains expressing each of the seven transporters in combination with the cellobiose phosphorylase SdCBP. In this case the trend was F213L>G91A>WT>Q104A>F170A>F335A>R174A>E194A (FIG. 6B). The most notable difference being that the optimal transporter was different between strains expression GH1-1 and SdCBP.

TABLE 10

| Cellobiose consumption rate (g/L-h) | | | Ethanol production rate (g/L-h) | | |
|---|---|---|---|---|---|
| | With BGL | With CBP | | With BGL | With CBP |
| WT CDT-1 | 1.02 ± 0.0600 | 0.36 ± 0.0350 | WT CDT-1 | 0.26 ± 0.011 | 0.2718 ± 0.0100 |
| G91A | 1.95 ± 0.1899 | 0.70 ± 0.0566 | G91A | 0.64 ± 0.0842 | 0.0855 ± 0.0193 |
| Q104A | 0.69 ± 0.0373 | 0.28 ± 0.0037 | Q104A | 0.15 ± 0.0100 | 0.0775 ± 0.0022 |
| F170A | 0.85 ± 0.0730 | 0.26 ± 0.0351 | F170A | 0.16 ± 0.0104 | 0.0000 ± 0.0136 |
| R174A | 0.27 ± 0.0475 | 0.04 ± 0.0028 | R174A | 0.02 ± 0.0020 | 0.0000 ± 0.0000 |
| E194A | 0.27 ± 0.0693 | 0.03 ± 0.0050 | E194A | 0.01 ± 0.0144 | 0.0750 ± 0.0000 |
| F335A | 1.49 ± 0.0520 | 0.26 ± 0.0276 | F335A | 0.44 ± 0.0113 | 0.1400 ± 0.0081 |
| F213L | 1.15 ± 0.0600 | 1.11 ± 0.1110 | F213L | 0.28 ± 0.0100 | 0.4860 ± 0.0490 |

[0316] Table 10 quantifies cellobiose consumption and ethanol production of engineered yeast strains with the various cdt-1 mutants. The D452-2 strain of S. cerevisiae was transformed with either WT cdt-1 or one of the cdt-1 mutants, and a codon-optimized cellobiose phosphorylase gene from S. degradans or the β-glucosidase gene gh1-1. The rate at which the strains consumed cellobiose and produced ethanol is shown in Table 10. All values are the means of the results for two independent fermentations, and error bars represent the standard deviations of the results between two fermentations.

[0317] To assess transporter function directly, a Michaelis-Menten analysis of the 4 transporters giving the best fermentation rates (WT, G91A, F335A, and F213L) was performed by measuring the rate of [³H] cellobiose uptake into cells at various concentrations of [³H] cellobiose (FIG. 8). The results are quantified in Table 11. Compared to WT (K_{M}=7.6±1.5 μM, Vₘₐₓ=0.60±0.03 μmol/s), all of the mutants had a lower affinity for cellobiose. However, the three mutants had a higher Vₘₐₓ. Thus, transporters that allow faster fermentation rates also transport cellobiose at a higher maximum velocity.

TABLE 11

| | | Vₘₐₓ | Vₘₐₓ |
|---|---|---|---|
| | | (pmol/s, norm. to | (pmol/s, norm. |
| | K_{M} (μM) | 2 × 10⁸ cells) | for GFP fluo.) |
| WT | 7.6 ± 1.5 | 0.60 ± 0.03 | 0.86 ± 0.05 |
| F213L | 188.8 ± 55.3 | 2.66 ± 0.37 | 2.38 ± 0.31 |
| F335A | 114.8 ± 46.4 | 1.64 ± 0.24 | 1.75 ± 0.26 |
| G91A | 43.5 ± 10.1 | 1.51 ± 0.10 | 1.87 ± 0.12 |

[0318] In the above measurements of transporter kinetics, strains were grown on glucose, which resulted in each transporter being expressed at similar levels (±˜20% of WT) as judged by the amount of GFP fluorescence per cell. However, during fermentation of cellobiose this was not the case. There were large differences in the amount of GFP fluorescence per cell depending upon which transporter mutant the yeast cells expressed (FIG. 9). Furthermore, these differences were strongly correlated to cellobiose consumption and ethanol production rates.

[0319] Analysis of Intracellular Cellobiose Metabolism

[0320] Despite the use of identical transporter genes, the distinct differences in strain performance when cellobiose is cleaved by hydrolysis versus phosphorolysis suggest that the fate of transported cellobiose depends upon the mechanism and kinetics of its intracellular processing. Therefore, the intracellular metabolism of the engineered yeast strains was analyzed by measuring select enzymatic activities in whole cell extracts. The extracts were prepared from cells during the exponential phase of cellobiose fermentation by strains expressing CDT-1 and either GH1-1 or SdCBP. The strains expressed CDT-1 at identical levels according to the amount of GFP fluorescence (FIG. 10A). For additional comparisons, extracts were prepared from WT D452-2 yeast during the exponential phase of glucose fermentation.

[0321] To determine if there was a significant difference in the ability of the two strains to cleave intracellular cellobiose, the amount of cellobiase activity in 10 μg of extract (as determined by the Bradford assay) was measured. Cellobiase activity was defined as the rate of glucose produced from cellobiose regardless of the mechanism, and was similar in strains expressing GH1-1 or SdCBP (FIG. 10B). As expected, there was no detectable cellobiase activity in extracts of WT D452-2 (FIG. 10B). It is important to note that this assay underestimates the activity of cellobiose phosphorylase by 50% because the glucose-1-phosphate produced by this enzyme is not accounted for.

[0322] Moreover, the amount of hexokinase activity in 10 μg of these extracts was indistinguishable between strains with GH1-1 and SdCBP (FIG. 10C). Additionally, both strains had slightly more hexokinase activity than the WT D452-2 strain (FIG. 10C).

[0323] As noted above, during cellobiose fermentation performed with strains expressing CDT-1 mutants with GH1-1, glucose and cellodextrins accumulated in the media. Yet this is not observed during fermentation with strains expressing CDT-1 mutants with SdCBP. The accumulation of glucose and cellodextrins is believed to be due to their efflux following either cellobiose hydrolysis or transglycosylation. Transglycosylation by β-glucosidases is a well documented activity in which high concentrations of glucose and cellobiose are dehydrated to cellotriose and cellotetraose.

[0324] To assay the transglycosylation activity of GH1-1 and SdCBP, both enzymes were enriched from cell extracts by IMAC. The enriched enzymes were then incubated with 20% (w/v) cellobiose for 24 hours, and the reaction products were analyzed by HPLC. GH1-1, but not SdCBP, had significant transglycosylation activity under these conditions producing approximately 0.45 mg of cellotriose and approximately 0.1 mg of cellotetraose from 2 mg of cellobiose (FIG. 11). The kinetic parameters of the enriched proteins were also measured, and the results are depicted in FIG. 12 and quantified in Table 12.

TABLE 12

| | K_{M} (mM) | k_{cat} (s⁻¹) | k_{cat}/K_{M} |
|---|---|---|---|
| GH1-1 | 0.32 | 7 | 21910 |
| SdCBP | 0.65 | 7 | 11515 |

[0325] Cellobiose is not naturally found in the cytosol of S. cerevisiae, and its presence may have numerous unforeseen consequences. One potential consequence may involve hexokinases. Hexokinases bind tightly to glucose, and therefore may interact with, or be inhibited by, the high concentration of cellobiose found in the yeast strains engineered to express a cellodextrin transporter and a cellobiose phosphorylase.

[0326] To test whether cellobiose inhibits yeast hexokinases, the hexokinases were expressed and purified from E. coli. The activity of the purified enzymes was then assayed in the presence and absence of up to 184 mM cellobiose. At these extreme concentrations of cellobiose the activity of hexokinase Hxk1 was unaffected (FIG. 13). However, the activity of hexokinases Hxk2 and Glk1 were reduced by ˜20% (FIG. 13).

[0327] To determine whether or not hexokinase activity was limiting in the engineered pathways, all three yeast hexokinases (HKX1, HXK2, and GLK1) were over-expressed in a strain expressing the mutant cellodextrin transporter CDT-1 (F213L) and the S. degradans cellobiose phosphorylase SdCBP (FIG. 14). While the over-expression of HXK2 or GLK1 did not change strain performance, over-expression of HXK1 resulted in a 28% improvement in ethanol productivity (FIG. 14C and Table 13). Cell density, ethanol production and yield, and ethanol productivity for these strains are summarized in Table 13.

TABLE 13

| | OD | Ethanol | Yield | Productivity |
|---|---|---|---|---|
| | (600 nm) | (g/L) | (g/g) | (g/L-h) |
| pRS423 | 19 | 28 | 0.46 | 0.75 |
| PRS423-HXK1 | 20 | 36 | 0.46 | 0.96 |
| PRS423-HXK2 | 19 | 30 | 0.46 | 0.79 |
| PRS423-GLK1 | 19 | 31 | 0.46 | 0.81 |

[0328] Furthermore, the ethanol productivity of the strain expressing HXK1 increased linearly with increasing initial cell densities, up to 2.69 g ethanol/L-h with an initial density (OD) of 23.1 (FIGS. 15 and 16).

[0329] Discussion

[0330] Disclosed herein is an analysis of two cellobiose-fermentation pathways engineered into S. cerevisiae with the intention of improving fuel and chemical production from lignocellulosic feedstock. The first pathway utilizes a cellodextrin transporter and an intracellular β-glucosidase, as reported previously, while the second pathway utilizes the same cellodextrin transporter with an intracellular cellobiose phosphorylase. The hydrolytic pathway appears commonly in cellulolytic fungi, where its biological role is believed to include cellulose sensing and metabolism, and the enablement of symbiotic relationships with plants. The phosphorolytic pathway exists within prokaryotes that are simultaneously cellulolytic and anaerobic, where it maximizes energy gain from cellodextrin consumption when respiration is impossible. This is because phosphorolytic cleavage produces glucose-1-P, thus reducing the amount of ATP that must be consumed to phosphorylate cellodextrin-derived glucose before it may enter glycolysis.

[0331] Functional cellobiose fermentation pathways were successfully constructed with cellobiose phosphorylases with no more than 71% pairwise amino acid identity from three different anaerobic bacteria, suggesting that special properties besides core enzymatic function are not necessary. However, the above results suggest that it is important to codon-optimize these genes for expression in S. cerevisiae, and that results vary with the optimization algorithm used.

[0332] Un-optimized strains with the cellodextrin transporter, CDT-1, and an intracellular cellobiose phosphorylase (CBP) fermented cellobiose to ethanol slower than strains with CDT-1 and an intracellular β-glucosidase. While this would suggest that CBP activity is limiting, other results argue against this. After serial passage of a phosphorolytic strain in cellobiose media, a new strain emerged that fermented cellobiose approximately as fast as strains with the hydrolytic pathway, and the point mutation necessary for this improvement did not affect the CBP gene or its expression as would be expected if CBP activity was limiting. Rather the cellodextrin transporter, CDT-1, was mutated to a low-affinity/high-capacity form. Furthermore, other low-affinity/high-capacity forms of CDT-1 improved fermentation rates with the phosphorolytic pathway. Together these observations suggest that transport rate is actually limiting the phosphorolytic strain.

[0333] However, it does not appear that the ideal transporter is simply one with the highest capacity, but rather that the optimal transport kinetics depends upon the metabolic context. This is clearly seen in our comparison of strains with a variety of CDT-1 mutants and either an intracellular beta-glucosidase or cellobiose phosphorylase. This analysis showed that identical transporters did not give identical results in the context of either the hydrolytic or phosphorolytic pathway. For example, the CDT-1 mutant G91A is optimal for the hydrolytic pathway, while the mutant F213L is optimal for the phosphorolytic pathway.

[0334] Ultimately the performance of any metabolic pathway may depend on both the maximum capacity of the enzymes in the pathway, and the in vivo activity of the enzymes as dictated by their interactions with small-molecular substrates, products, and effectors. In this study, a limited comparison has been made of these factors between the hydrolytic and phosphorolytic strains during cellobiose fermentation. There were no significant differences in the enzyme capacities of the strains leading from cellobiose to glucose-6-phosphate, the entry point to glycolysis. A notable exception is in the capacity of the hydrolytic pathway to transglycosylate cellobiose to longer cellodextrins such as cellotriose and cellotetraose: GH1-1 is capable of this activity and strains with the hydrolytic pathway cause a significant build-up of longer cellodextrins as they ferment cellobiose to ethanol.

[0335] The greatest advantage to the cellulolytic pathway may be that its performance continues to improve as higher cell loadings are used. This is particularly important during fuel production, where high-gravity fermentations are commonly employed to rapidly ferment feedstock, thus making optimal use of capital-intensive fermenter space.

### Example 2

[0336] This Example describes the identification of conserved motifs in cellodextrin phosphorylases and the identification of additional cellodextrin phosphorylases.

[0337] A first round of PSI-BLAST was run using the Clostridium thermocellum (BAA22081.1), Acidovibrio cellulolyticus (ZP_{—}07328763.1) and Clostridium lentocellum (YP_{—}004310865.1) cellodextrin phosphorylase amino acid sequences as simultaneous inputs. From the result of the first round, all hits annotated as “cellodextrin phosphorylase” were used as simultaneous inputs for a second round of PSI-BLAST.

[0338] From the results of the second round, all sequences annotated as “cellodextrin phosphorylase” were used to produce a multiple sequence alignment using T-COFFEE.

[0339] This multiple sequence alignment was used as an input for the PRATT server (http://web.expasy.org/pratt/) to identify the highest scoring motif. The motif is shown in PROSITE format: G-x(2)-[FY]-x-N-[AGS]-x-[AS]-W-[APS]-V-[IL]-[AS]-x(2)-A-x(2)-[DE]-x-[AI]-x(3)-[LMV]-[DEN]-[ASV]-[ILV]-x(3)-L-x-T-x(2)-G-[ILV]-x(2)-[SV]-x-P-[AG] (SEQ ID NO: 14).

[0340] The conserved motif was then used to find cellobiose phosphorylase proteins by using the PROSITE server (http://prosite.expasy.org/scanprosite/). The PROSITE server identified 16 additional cellodextrin phosphorylases. The 16 phosphorylases are listed in Table 4 above.

### Example 3

[0341] This Example describes the identification of conserved motifs in cellobiose phosphorylases and the identification of additional cellobiose phosphorylases.

[0342] Conserved Motif in Cellobiose Phosphorylase

[0343] A first round of PSI-BLAST was run using the Saccharophagus degradans (YP_{—}526792.1), Cellvibrio gilvus (2CQS_A) and Clostridium thermocellum (YP_{—}001036707.1) cellobiose phosphorylase amino acid sequences as simultaneous inputs. From the result of the first round, all hits annotated as “cellobiose phosphorylase” or “cellulose degradation product phosphorylase” were used as simultaneous inputs for a second round of PSI-BLAST.

[0344] From the results of the second round, all sequences that score higher than Saccharophagus degradans (YP_{—}526792.1), Cellvibrio gilvus (2CQS_A) and Clostridium thermocellum (YP_{—}001036707.1) cellobiose phosphorylases were used to produce a multiple sequence alignment using EXPRESSO with PDB file, 2CQS, as a structural template.

[0345] This multiple sequence alignment was used as an input for the PRATT server (http://web.expasy.org/pratt/) to identify the highest scoring motif. The motif is shown in PROSITE format: Y-Q-[CN]-M-[IV]-T-F-[CN]-[FILMV]-[AS]-R¹-[ST]-[AS]-S-[FY]-[FY]-E-[STV]-G-x-[GS]-R²-G-[IM]-G-F-R-D-S-[ACNS]-Q-D-[ILV]-[ILMV]-G-x-V-H-x-[IV]-P-[ADEST]-x-[AV]-[KR]-[AEQ]-x-[IL]-[FIL]-D (SEQ ID NO: 15). Within this motif, R¹ indicates an arginine involved in inorganic phosphate binding (R351) in the Cellvibrio gilvus cellobiose phosphorylase. R² indicates an arginine involved in forming the cellobiose binding pocket (R362) in the Cellvibrio gilvus cellobiose phosphorylase.

[0346] The conserved motif was identified in the crystal structure of the Cellvibrio gilvus cellobiose phosphorylase PDB 2CQS (FIG. 17).

[0347] The conserved motif was then used to find cellobiose phosphorylase proteins by using the PROSITE server (http://prosite.expasy.org/scanprosite/). The PROSITE server identified 91 additional cellobiose phosphorylases. The 91 phosphorylases are listed in Table 5 above.

[0348] Conserved Motif Found in Both Cellobiose Phosphorylases and Cellodextrin Phosphorylases

[0349] Cellodextrin phosphorylases appear to have diverged from cellobiose phosphorylases in how the inorganic phosphate is bound. For example, the two conserved arginines identified in the Cellvibrio gilvus cellobiose phosphorylase are not conserved across cellodextrin phosphorylases. Although no crystal structure of a cellodextrin phosphorylase is known, a similar approach to that described above for the crystal structure of the Cellvibrio gilvus cellobiose phosphorylase was used to identify a PROSITE motif that is conserved among both cellobiose phosphorylases and cellodextrin phosphorylases. The motif is shown in PROSITE format: Y-x(2)-G-x-[KR]-E-N-[AG]-[AG]-[IV]-F-x(2)-[ANST]-[NST]-x(2)-[AIV]-x(2)-[AGT]-x(4)-[AG]-x(4)-[ADNS] (SEQ ID NO: 233).

[0350] Based on analysis of the Cellvibrio gilvus cellobiose phosphorylase crystal structure with PDB 3QG0, the conserved motif appears to line the substrate-binding site of cellobiose and cellodextrin phosphorylases.

### Example 4

[0351] This Example describes enhanced cellodextrin utilization by an engineered Saccharomyces cerevisiae expressing a cellodextrin transporter and a cellodextrin phosphorylase.

[0352] Introduction

[0353] Three genes (CDP-Acell, CDP-Clent, and CDP-Ctherm) coding for cellodextrin phosphorylase (CDP) were introduced into S. cerevisiae expressing the wild-type cellodextrin transporter CDT-1 or the mutant cellodextrin transporter CDT-1 (F213L). In order to check the capability of utilizing cellobiose, cellotriose or cellotetraose by engineered S. cerevisiae strains, small-scale fermentation experiments were performed in YP medium containing cellobiose, cellotriose, or cellotetraose.

[0354] Materials and Methods

[0355] Strains

[0356] The S. cerevisiae strains that were utilized are described in Table 14.

### Table 14

TABLE 14

| | | Cellodextrin |
|---|---|---|
| Name | CBP/CDP | Transporter |
| D452-2 | None | None |
| D452-SdCBP-CDT-1 | SdCBP | CDT-1 |
| D452-SdCBP-CDT-1_F213L | SdCBP | CDT-1 (F213L) |
| D452-CDP_Acell-CDT-1 | CDP_Acell | CDT-1 |
| D452-CDP_Clent-CDT-1 | CDP_Clent | |
| D452-CDP_Ctherm -CDT-1 | CDP_Ctherm | |
| D452-CDP_Acell-CDT-1_F213L | CDP_Acell | CDT-1 (F213L) |
| D452-CDP_Clent -CDT-1_F213L | CDP_Clent | |
| D452-CDP_Ctherm -CDT-1_F213L | CDP_Ctherm | |

[0358] In Table 14, “Name” refers to the strain name; “CBP.CDP” refers to the cellobiose phosphorylase or cellodextrin phosphorylase gene that is expressed by the strain; and “Cellodextrin Transporter” refers to the cellodextrin transporter gene that is expressed by the strain.

[0359] Fermentation Conditions

[0360] Fermentation experiments were performed in YP medium containing 5 g/L of cellobiose, cellotriose, or cellotetraose. A 96 well plate was used to monitor growth on cellodextrin as a sole carbon source. The culture volume in each well was 200 μL and 50 μL of mineral oil was overlaid on the top of the culture to prevent evaporation of the medium during growth measurement. The initial cell density was adjusted to OD600=˜0.2. A Synergy H4 hybrid Microplate Reader (BioTek Instruments Inc., Winooski, Vt.) was used for measuring absorbance at 600 nm with a continuous mixing option.

[0361] Results

[0362] Cellobiose or Cellodextrin Utilization by S. cerevisiae Strains Expressing the Wild-Type CDT-1 Gene and Various Cellodextrin Phosphorylase (CDP) Genes

[0363] Each of three cellodextrin phosphorylases (CDP_Clent, CDP_Ctherm, and CDP_Acell) from Clostridium lentocellum, Clostridium thermocellum, Acidovibrio cellulolyticus, respectively; and cellodextrin transporter (cdt-1) from Neurospora crassa were introduced in S. cerevisiae D452-2. The resulting transformants were subjected to growth tests on cellobiose, cellotriose, and cellotetraose (FIG. 18). As a control strain for growth comparison, an engineered strain expressing cellobiose phosphorylase (SdCBP) and cellodextrin transporter (CDT-1) was used. In cellobiose medium, only the D452-SdCBP-CDT-1 strain harboring cellobiose phosphorylase (SdCBP) and cellodextrin transporter (CDT-1) was able to grow well. While engineered S. cerevisiae strains having cellodextrin phosphorylase and cellodextrin transporter did not grow on cellobiose, the D452-CDP_Clent-CDT-1 strain expressing cellodextrin phosphorylase (CDP_Clent) from C. lentocellum and cellodextrin transporter (CDT-1) was able to grow on cellobiose very slowly (FIG. 18A). This result suggests that CDP_Clent can use cellobiose as a substrate. When cellotriose was used as a carbon source, none of the engineered strains showed measurable growth. Only the D452-CDP_Clent-CDT-1 strain grew very slowly (FIG. 18B). When cellotetraose was used as a sole carbon source, the D452-SdCBP-CDT-1 and D452-CDP_Clent-CDT-1 strain showed measurable growth (FIG. 18C).

[0364] These results suggest that the cellodextrin phosphorylase CDP_Clent from C. lentocellum can facilitate utilization of cellobiose, cellotriose, and cellotetraose when cellodextrin transporter (CDT-1) is co-expressed in S. cerevisiae.

[0365] Enhanced Cellobiose or Cellodextrin Utilization by S. cerevisiae Strains Expressing the Mutant CDT-1 F213L Gene and Various CDP Genes

[0366] Utilization of cellodextrin by the engineered S. cerevisiae expressing various cellodextrin phosphorylases can be limited by the capacity of the cellodextrin transporter (CDT-1). Therefore, a new set of engineered strains was constructed that expressed each of three cellodextrin phosphorylases (CDP_Acell, CDP_Clent, and CDP_Ctherm) and a mutant cellodextrin transporter (CDT-1 F213L). In order to compare cellodextrin utilization rates by these strains, cell growth on cellobiose, cellotriose, and cellotetraose was monitored. As a control strain for growth comparison, an engineered strain expressing cellobiose phosphorylase (SdCBP) and cellodextrin transporter (CDT-1 F213L) was used. When cellobiose was used as a carbon source, the D452-SdCBP-CDT-1_F213L strain harboring cellobiose phosphorylase (SdCBP) and a mutant cellodextrin transporter (CDT-1_F213L) grew rapidly as previously observed (FIG. 19A). The D452-CDP_Clent-CDT-1_F213L strain expressing cellodextrin phosphorylase (CDP_Clent) from Clostridium lentocellum and a mutant cellodextrin transporter (CDT-1 F213L) also grew well on cellobiose (FIG. 19A). When cellotriose was used as a carbon source, both the D452-SdCBP-CDT-1_F213L and CDP_Clent-CDT-1_F213L strains were able to grow (FIG. 19B). However, the CDP_Clent-CDT-1_F213L strain grew much better than D452-SdCBP-CDT-1_F213L in contrast to the cellobiose condition. Moreover, the CDP_Clent-CDT-1_F213L strain grew very well even on cellotetraose, while the D452-SdCBP-CDT-1_F213L strain did not show measurable growth on cellotetraose (FIG. 19C). These results suggest that the cellodextrin phosphorylase from Clostridium lentocellum (CDP_Clent) can utilize three tested cellodextrins (cellobiose, cellotriose, and cellotetraose).

[0367] The D452-CDP_Ctherm-CDT-1_F213L strain harboring the cellodextrin phosphorylase from Clostridium thermocellum (CDP_Ctherm) and a mutant cellodextrin transporter (CDT-1 F213L) showed measurable growth on cellotriose and cellotetraose (FIGS. 19B and 19C). However, the D452-CDP_Acell-CDT-1_F213L strain expressing the cellodextrin phosphorylase from Acidovibrio cellulolyticus (CDP_Acell) and a mutant cellodextrin transporter (CDT-1 F213L) did not show any measureable growth on cellobiose, cellotriose, or cellotetraose.

[0368] Improved cellodextrin utilization by engineered S. cerevisiae was observed when a mutant cellodextrin transporter (CDT-1 F213L) was paired with either a cellobiose phosphorylase or cellodextrin phosphorylase, suggesting that the CDT-1 F213L transporter is capable of facilitating efficient transportation of cellodextrins, as well as cellobiose, with a higher degree of polymerization (DP).

### Example 5

[0369] This Example describes cellobiose-mediated growth rates of S. cerevisiae strains that were transformed with the cellodextrin transporter CDT-1 and various Sacharophagus degradans cellobiose phosphorylase mutants (SdCBP).

[0370] Materials and Methods

[0371] Plasmids each encoding Sacharophagus degradans cellobiose phosphorylase (SdCBP) containing point mutations were transformed into the S. cerevisiae D452-2 strain that expresses the CDT-1 cellodextrin transporter. For each CBP mutant a single colony was picked to inoculate 5 mL starter cultures in YP media containing 2% cellobiose as the carbon source.

[0372] The initial OD for fermentation cultures was set to −0.5 and fermentation experiments were carried out using 5 mL of YP media with 8% cellobiose as the carbon source, in 50 mL Falcon tubes. Cultures were grown at 30° C. with continuous shaking. Fermentation experiments were also performed on S. cerevisiae D452-2 strains containing the wild-type SdCBP or the wild-type β-glucosidase GH1-1.

[0373] The OD600 of each culture was measured every 12 hours and growth rates (increase in growth per hour) are shown in Table 15. Each point represents the average of three measurements.

[0374] Results

[0375] The results depicted in Table 15 show that strains containing certain CBP mutants had growth rates that were comparable or greater than that of strains containing the wild-type CBP. In particular the I409M CBP mutant showed had a growth rate of 1.061 hr⁻¹, which was comparable to the growth rate of the wild-type CBP (1.135 hr⁻¹), while the CBP mutant N482D had a growth rate of 1.236 hr⁻¹.

TABLE 15

| | Growth rate | | Growth rate |
|---|---|---|---|
| SdCBP mutant | (hr⁻¹) | SdCBP mutant | (hr⁻¹) |
| Wild-type CBP | 1.135 | Wild-type BGL | 1.3 |
| C484S | 0.696 | I409R | 0.637 |
| E646A | 0.027 | D361A | 0 |
| E693A | 0.184 | H653A | 0.879 |
| N647Q | 0 | I409M | 1.061 |
| F651W | 0.511 | C484A | 0.408 |
| D483A | 0 | R360A | 0.264 |
| D483N | 0 | N482T | 0.376 |
| H653N | 0.759 | N482D | 1.236 |
| K645R | 0 | W481A | 0 |
| Q165A | 0 | Y640W | 0.184 |
| I409Q | 0.872 | | |

### Example 6

[0376] This Example describes modifying the glucose response pathway in cellodextrin-transporting cells to optimize metabolism.

[0377] In this example, the glucose response pathway of yeast expressing a cellodextrin transporter and an intracellular β-glucosidase is modified to optimize the cell's metabolism of glucose. Yeast strains engineered to express cdt-1 or cdt-2 along with an intracellular β-glucosidase (gh1-1) are further genetically modified to express constitutively active alleles of various glucose response genes. The constitutively-active alleles are expressed under the control of an inducible promoter. Alternatively, the wild-type allele is replaced with the constitutively active allele by targeted recombination.

[0378] Yeast are modified with the following mutant alleles by either inducible expression or targeted recombination: the Snf3 R229K allele (Ozcan, PNAS, 1996), the Rgt2 R231K allele (Ozcan, PNAS, 1996), the Yck1-Rgt2tail chimera (Moriya and Johnston, PNAS, 2004), Gpa2^{val132} (Tamaki, J of Biosciences and Bioengineering, 2007), Gpa2^{Q300L} (Wang et al., PLOS Biology, 2004), Ras2^{G19V} (Wang et al., PLOS Biology, 2004), Hxk2^{S14A} (Moreno and Herrero, FEMS, 2002), Pfk27ΔN, and each of the Hxt glucose transporter genes containing the C-terminal tail of Snf3 or Rgt2.

[0379] After modification with the mutant glucose response gene alleles, yeast are grown with cellodextrins as the sole carbon source under fermentation conditions. The amount of ethanol produced by each strain is compared to the amount of ethanol produced by a control strain, a yeast strain expressing cdt-1 or cdt-2 and gh1-1 with all wild-type glucose response genes. An increase in ethanol production in an experimental strain compared to the control strain shows that glucose metabolism has been optimized.

### Example 7

[0380] This Example describes the results of modifying glucose response pathways in yeast strains that have been engineered to utilize cellobiose.

[0381] Introduction

[0382] Based on systematically studying cell wall degradation by the cellulolytic fungus Neurospora crassa, two cellodextrin transporter families were discovered. Ethanologenic Sacchromyces cerevisiae heterologously expressing these transporters and intracellular beta-glucosidase from N. crassa can use cellodextrins as substrates to produce ethanol. The identified transporter pathway has opened up a new way of thinking about microbial fermentation of hexoses, as well as of pentoses derived from plant cell walls [1]. However, when non-native cellodextrin substrates are used instead of native substrates, such as glucose, are used, the lag phase in S. cerevisiae is prolonged and the maximal growth rate is lower. This phenomenon is also exemplified by pentose utilization in S. cerevisiae [2]. It seems that S. cerevisiae cannot sense and metabolize these normative substrates as a rapidly fermentable carbon source like glucose [3].

[0383] S. cerevisiae uses at least three different pathways to sense glucose in its environment [4]. These include three extracellular pathways (via the G-protein receptor Gpr1, and two transceptors Snf3 and Rgt2), and one intracellular pathway that involves Ras/PKA. Since the cellobiose transport pathway would likely bypass Gpr1, Snf3 or Rgt2, it may only be capable of partially activating the Ras/PKA pathway following transport and hydrolysis of cellobiose. Thus, the metabolic state of S. cerevisiae growing on cellobiose is not optimized to handle the flux of glucose that cellobiose hydrolysis provides. In order to address the above hypothesis, key genes in the signaling pathway (Table 16) were mutated, either by deletion or constitutive activation, to probe the length of the lag phase and growth rates of the resulting strains.

TABLE 16

| | |
|---|---|
| Mutant strain of key genes | Origin |

Glucose sensing pathway

| | |
|---|---|
| Snf3 deletion | Open Biosystems |
| Rgt2 deletion | Open Biosystems |
| Gpr1 deletion | Open Biosystems |
| Snf3, Rgt2 double deletion | This study |
| Snf3, Rgt2, Gpr1 triple deletion | This study |
| Rgt1 deletion | Rine lab |

Intracellular signaling pathway

| | |
|---|---|
| Ras2 deletion | Open Biosystems |
| Ras2^{G19V}, constitutively active allele | This study |
| Ras2^{Q77K}, RAS2^{D112Y}, activity reduced alleles | This study |
| Gpa2 deletion | Open Biosystems |
| Gpa2^{G132V}, GPA2^{Q300L}, constitutively active alleles | This study |
| Sch9 deletion | This study |
| Sch9^{3E}, SCH9^{2D3E} | This study |
| Yak1 deletion | Open Biosystems |
| Grr1 deletion | Rine lab |

Glucose repression pathway

| | |
|---|---|
| Hxk2 deletion | Open Biosystems |
| Hxk2wrf without regulatory function strain | This study |
| (GFP-tagged) | |
| Snf1 deletion | Rine lab |
| Mig1 deletion | Rine lab |

Other key genes related to cell growth

| | |
|---|---|
| Rim15 deletion | Open Biosystems |
| Stb3 deletion | Open Biosystems |
| Kcs1 deletion | Open Biosystems |
| Tps1 deletion | Rine lab |

[0384] Materials and Methods

[0385] Strains and Plasmid Constructs

[0386] S. cerevisiae BY4742 (MATalpha his3Δ1 leu2Δ0 met15Δ0 ura3Δ0) were used for engineering of cellobiose metabolism in yeast. Yeast MATalpha knockout strains were obtained from Open Biosystems. Escherichia coli Top10 was used for gene cloning and manipulation. Cellobiose metabolism was composed of Neurospora crassa beta-glucosidase gene (gh1-1) and cellodextrin transporter gene (cdt-1). As previously reported [5], gh1-1 was cloned into the pRS425 plasmid under PGK promoter and CYC1 terminator, and cdt-1 was cloned into the pRS426 under PGK promoter and CYC1 terminator as well as with C-terminal GFP tag.

[0387] Medium and Culture Conditions

[0388] E. coli was grown in Luria-Bertani medium; 50 g/ml of carbenicillin was added to the medium when required. Yeast strains were cultivated at 30° C. in YP medium (10 g/L yeast extract and 20 g/L Bacto peptone) with 20 g/L of glucose. Transformed strains were grown in the appropriate complete minimal dropout media, supplemented to 100 mg/L adenine hemisulfate. For carbon source transfer experiment, yeast synthetic complete (YSC) medium were used, which contained 6.7 g/L of yeast nitrogen base plus 20 g/L of glucose or 20 g/L cellobiose, and CSM-Leu-Ura which supplied appropriate nucleotides and amino acids.

[0389] Mutant Generation

[0390] The mutants of Ras2, Gpa2, and Sch9 were generated via site-directed mutagenesis using QuikChange site-directed mutagenesis kit (Stratagene), and confirmed by sequencing. The Hxk2 mutant lacking regulatory function was constructed according to the reported method [6]. The truncation mutant was obtained by PCR-deletion of 30 bp, between nucleotides +19 and +48, the resulting gene HXK2ΔK6M15, expressed a truncated Hxk2 protein without the amino acids from Lys6 to Met15 (Hxk2wrf). Mutant versions of Hxk2, Ras2, Gpa2, and Sch9 were introduced into chromosome to replace the wild type alleles using a two-step (selection, counter-selection) gene replacement method [7]. The wild type allele (ATG to stop codon) was replaced with the URA3 marker using PCR-based gene manipulation methods [8]. The transformants were selected on YSC-Ura plates and verified by PCR with forward primers ˜200 bp upstream of the replaced ORF and reverse primers within the URA3 marker sequence (Table 16). The URA3 marker was then replaced with mutant allele using an identical approach (except selection of positive transformants was carried out on 5-fluoroorotic acid (5-FOA) and verified by PCR with the same forward primers for deletion verification and reverse primers within the replaced ORF (Table 17). Specially, C-terminal GFP tagged Hxk2 and Hxk2wrf were used in gene replacement. Precise gene replacement was confirmed by sequencing.

[0391] Table 17 lists the primers used for generating mutants. In Table 16, underlined nucleotides are those that were changed by mutagenesis.

TABLE 17

| | |
|---|---|
| Name | Sequence |

Deletion cassette with URA3 maker gene

| | | |
|---|---|---|
| RAS2-DF | TAACCGTTTTCGAATTGAAAGGAGATATACAGAAAAAAAAGATTCGGTAATCTCCGAACA | (SEQ ID NO: 234) |
| RAS2-DR | TTCTTTTCGTCTTAGCGTTTCTACAACTATTTCCTTTTTACACACCGCATAGGGTAATAA | (SEQ ID NO: 235) |
| GPA2-DF | TTGTTACAGCACAAATCACGCGTATTTTCAAGCAAATATCGATTCGGTAATCTCCGAACA | (SEQ ID NO: 236) |
| GPA2-DR | AGAAGAGGCATGCAGTTTTGTCTCTGTTTTAGCTGTGCATCACACCGCATAGGGTAATAA | (SEQ ID NO: 237) |
| SCH9-DF | ATACTCGTATAAGCAAGAAATAAAGATACGAATATACAATGATTCGGTAATCTCCGAACA | (SEQ ID NO: 238) |
| SCH9-DR | AAGGAAAAGAAGAGGAAGGGCAAGAGGAGCGATTGAGAAACACACCGCATAGGGTAATAA | (SEQ ID NO: 239) |
| HXK2-DF | TATAATTCTCCACACATAATAAGTACGCTAATTAAATAAAGATTCGGTAATCTCCGAACA | (SEQ ID NO: 240) |
| HXK2-DR | GGCACCTTCTTGTTGTTCAAACTTAATTTACAAATTAAGTCACACCGCATAGGGTAATAA | (SEQ ID NO: 241) |

Verification of deletion strain using URA3 maker gene

| | | |
|---|---|---|
| RAS2-UP | CTGGAGCGTGACATTTAGGA | (SEQ ID NO: 242) |
| GPA2-UP | TTGAAGACCCACCGTAACCA | (SEQ ID NO: 243) |
| HXK2-UP | TGATTGCGAGATCCACGAAA | (SEQ ID NO: 244) |
| URA3-R | CCACATCATCCACGGTTCTAT | (SEQ ID NO: 245) |

Mutant gene generation

| | | |
|---|---|---|
| RAS2-MR | ACCAACACCAACACCACCAAC | (SEQ ID NO: 246) |
| RAS2-MF | GTTGGTGGTGTTGGTGTTGGT | (SEQ ID NO: 247) |
| RAS2-77MF | CTATGAGGGAAAAATACATGCGC | (SEQ ID NO: 248) |
| RAS2-77MR | GCGCATGTATTTTTCCCTCATAG | (SEQ ID NO: 249) |
| RAS2-112MF | ATTGAGAGTCAAATATACCGACTATGT | (SEQ ID NO: 250) |
| RAS2-112MR | ACATAGTCGGTATATTTGACTCTCAAT | (SEQ ID NO: 251) |
| GPA2-132MR | ACCACTTTCAACGGCACCCAG | (SEQ ID NO: 252) |
| GPA2-132MF | CTGGGTGCCGTTGAAAGTGGT | (SEQ ID NO: 253) |
| GPA2-300MR | TTCGGAACGCAGTCCACCCAC | (SEQ ID NO: 254) |
| GPA2-300MF | GTGGGTGGACTGCGTTCCGAA | (SEQ ID NO: 255) |
| SCH9-737F | TGCTGGTTTCGAGTTTGTTGATGAGTCCGCCATCG | (SEQ ID NO: 256) |
| SCH9-737R | CATCAACAAACTCGAAACCAGCAAACTTTGCTTGC | (SEQ ID NO: 257) |
| SCH9-758F | CCTACAAAACGAGTACTTTATGGAACCTGGTTCC | (SEQ ID NO: 258) |
| SCH9-758R | CCATAAAGTACTCGTTTTGTAGGAATTTTCTGTTG | (SEQ ID NO: 259) |
| N-SCH9-765F | GGAACCTGGTGAGTTTATCCCGGGAAATCCAAAC | (SEQ ID NO: 260) |
| N-SCH9-765R | CCGGGATAAACTCACCAGGTTCCATAAAGTACTCG | (SEQ ID NO: 261) |
| SCH9-2D-F | GATGACTGCTGACCCGCTAGATCCAGCCATGCAAGCAAAGTTTG | (SEQ ID NO: 262) |
| SCH9-2D-R | GCATGGCTGGATCTAGCGGGTCAGCAGTCATCATCGGCTGGTGC | (SEQ ID NO: 263) |

Verification of gene replacement

| | | |
|---|---|---|
| RAS2-M | ACCGTATTAGCGCTTTGAGC | (SEQ ID NO: 264) |
| HXK2-M-R | TTCAAAGCATTGGCAGCCTT | (SEQ ID NO: 265) |

[0392] Carbon Source Transfer Experiment

[0393] Recombinant strains containing the cellobiose utilization pathway were grown on YSC plus glucose medium at 30° C. for 64 h to the late stationary phase, then inoculumed to YSC plus glucose and YSC plus cellobiose in parallel. Initial OD₆₀₀ was 0.2. Biological triplicates of all strains were performed in 50-ml tubes containing 10 ml media.

[0394] Results and Discussion

[0395] Extracellular Cellobiose Sensing by Glucose Sensors and Receptors

[0396] One way the yeast S. cerevisiae senses glucose is through two transmembrane glucose sensors, Snf3 and Rgt2. Extracellular glucose causes these sensors to generate an intracellular signal that induces expression of several HXT genes encoding hexose transporters [9]. The glucose signal induces this expression by influencing the function of the Rgt1 transcriptional repressor. Snf3 and Rgt2 have different affinities for glucose and separate, non-redundant functions [10]. Snf3 appears to be a sensor of low levels of glucose whereas Rgt2 is a sensor of high glucose concentrations. In addition to glucose, Snf3 also senses fructose and mannose, as well as the glucose analogues 2-deoxyglucose, 3-O-methylglucoside and 6-deoxyglucose. Transcriptomic analysis of engineered xylose utilizing yeast suggested that extracellular xylose could be sensed by Rgt2 and Snf3 [2].

[0397] Another way the yeast S. cerevisiae senses glucose is through Gpr1, a plasma membrane protein with seven transmembrane domains, coupled to the G protein Gpa2 and involved in the increase in cAMP levels triggered by glucose that initiates a signaling cascade leading to stimulation of fermentation [11]. The Gpr1-Gpa2 couple is responsive to glucose and to sucrose but not to other sugars such as fructose, 2-deoxyglucose or xylose; mannose acts as an antagonist, in which 100 mM sugar was used (Rolland et al., 2000). Higher concentration of xylose than 210 mM might be needed to be sensed by Gpr1 [2].

[0398] In order to determine whether yeast cells sense extracellular cellobiose through common glucose sensors, single deletion strains of Snf3, Rgt2 and Gpr1 were transformed with the cellobiose utilization pathway and their growth on cellobiose and glucose was compared (FIG. 21). It has been reported that deletion of Snf3 prevents rapid adaptation to low glucose concentration [12]. In this study, carbon source transfer experiment showed that Snf3 deletion slightly decreased growth on glucose, but had no effect on growth on cellobiose (FIG. 21). In terms of Rgt2 deletion, no significant differences were found from the wild type strain (FIG. 21). These results suggest that single deletion of Snf3 or Rgt2 has no effect on cellobiose sensing in yeast, but does not mean that cellobiose bypasses Snf3 and Rgt2. On the other hand, the Gpr1 deletion significantly decreased growth on both cellobiose and glucose (FIG. 21). This result suggests that Gpr1 can recognize cellobiose, and that the Gpr1/Gpa2 pathway may be activated by cellobiose.

[0399] Response of Intracellular Glucose Signaling Pathways to Cellobiose

[0400] Ras2 and Gpa2.

[0401] Protein kinase A (PKA) plays critical roles in growth, in response of cells to glucose, and in coupling cell cycle progression to mass accumulation. This pathway mainly induces genes that are involved in ribosomal protein synthesis, in ribosome biogenesis, in glycolysis and repression of genes that are involved in stress response, in gluconeogenesis, and in metabolism of storage carbohydrates. Induction of an activated allele of RAS2 (RAS2^{G19V}) in yeast cells growing in glycerol medium leads to the identical qualitative and quantitative changes in expression of 90% of all the genes whose expressions are altered by addition of glucose to wild-type cells [13]. Ras2^{Q77K} and RAS2^{D112Y}, two activity reduced alleles, were recently found in evolutionary stains which showed increased specific growth rate on galactose [14]. Gpr1 and Gpa2 define a nutrient-sensing pathway that works in parallel with Ras2 to activate PKA. These observations provide strong evidence that Ras2 plays a major role in mediating glucose-induced gene expression changes while Gpa2 plays a more auxiliary role in the glucose response, and both do so solely through modulation of PKA. As reported, extracellular glucose detection can be fulfilled via the constitutively active Gpa2^{G19V} allele in the absence of Gpr1 [15]. Moreover, microarray data showed that induction of GPA2^{Q300L} resulted in expression changes in the same sets of genes as did induction of an activated allele of Ras2 [16].

[0402] Sch9.

[0403] Sch9 acts in parallel to the Ras/PKA pathway but seems to serve as a minor conduit for glucose-mediated changes in transcription. Sch9 overexpression suppresses deficiencies in the PKA pathway and its inactivation results in diminished growth and reduced expression of genes in ribosomal biogenesis. Sch9 appears to serve as a major conduit by which TORC1 influences growth and mass accumulation. Sch9^{2D3E} (T723D, S726D, T737E, S758E, and S765E) is a TOR-independent SCH9 allele [17]. As such, Sch9 impinges on many of the same downstream targets as does PKA, which may account for the ability of excess Sch9 to compensate for loss of PKA activity. Both kinases act through separate signaling cascades. In addition, genome-wide expression analysis under conditions and with strains in which either PKA and/or Sch9 signaling was specifically affected, demonstrated that both kinases synergistically or oppositely regulate given gene targets [18].

[0404] Yak1.

[0405] Yak1 is a protein kinase that works in parallel to the Ras/PKA pathway in response to glucose but with the opposite effect: PKA suppresses the stress response and stimulates growth whereas Yak1 stimulates the stress response and inhibits growth [4].

[0406] Based on carbon source transfer experiments utilizing Ras2, Gpa2, Sch9, and Yak1 single deletion strains containing the cellobiose utilization pathway, both the Ras2 and Sch9 single deletion strains significantly prolonged the lag phase on cellobiose in contrast to those on glucose (FIGS. 22A and 22B). On the other hand, the Gpa2 deletion strain had a stronger effect on cellobiose-mediated growth than glucose-mediated growth (FIG. 22A). These results suggest that cells grown on glucose have robust signaling network. The Yak1 deletion strain had a slight effect on both cellobiose-mediated growth and glucose-mediated growth, which confirmed that Yak1 plays a minor role in the signaling pathways (FIG. 22C). Interestingly, a constitutively active allele of Gpa2 (Gpa2^{G19V}) seemed to have an intermediate effect on cellobiose-mediated growth, but was similar to the wild type allele when cells were grown on glucose (FIG. 23). Cellobiose activates the intracellular glucose repression pathway

[0407] Hxk2.

[0408] Hxk2 has a double subcellular localization: it functions as a glycolytic enzyme in the cytoplasm and as a regulator of gene transcription of several Mig1-regulated genes in the nucleus. Functional studies suggest that the main regulatory role of Hxk2 is produced by interaction with the transcriptional repressor Mig1 and the Snf1 protein kinase to generate a repressor complex in the nucleus [19, 20]. The Hxk2wrf mutant allele lacking amino acids from Lys₆ to Met₁₅ was incapable of glucose repression signaling but maintained hexose-phosphorylating activity [6].

[0409] Carbon source transfer experiments indicated that the Hxk2 deletion and the Hxk2wrf mutant that lacks the Hxk2 regulatory function did not appear to affect growth on cellobiose or glucose (FIGS. 24A and 24B). These results suggest that cellobiose may activate Hxk2-mediated glucose repression as strong as glucose.

[0410] Other Key Genes Related to Cell Growth

[0411] Rim15.

[0412] Rim15 is a glucose-repressible protein kinase involved in signal transduction during cell proliferation in response to nutrients, specifically the establishment of stationary phase.

[0413] Stb3.

[0414] Stb3 is ribosomal RNA processing element (RRPE)-binding protein involved in the glucose-induced transition from quiescence to growth. Stb3 overexpression produces a slow growth phenotype [21].

[0415] Kcs1.

[0416] Kcs1 deletion leads to high concentration of ATP, and enhanced glycolytic flux and fermentation [22].

[0417] Tps1.

[0418] Glycolytic activity and gene expression are controlled by metabolic intermediates, including trehalose-6-P. Tps1 is involved in synthesis of trehalose-6-P, which inhibits Hxk2 activity [23].

[0419] Growth of the Rim15 deletion strain on both cellobiose and glucose showed decreased growth (FIG. 25). The Stb3 deletion strain grown on cellobiose and glucose seemed to show opposite results in that growth on cellobiose decreased while growth on glucose increased (FIG. 25). The Kcs1 deletion strain showed decreased growth on cellobiose (FIG. 25). The result with Kcs1 was surprising, as it was expected that deleting Kcs1 would benefit cellobiose utilization given that is has been reported that Kcs1 deletion leads to a high concentration of ATP.

### REFERENCES

[0420] 1. Galazka J M, Cate J H (2011) A new diet for yeast to improve biofuel production. Bioeng Bugs 2.
[0421] 2. Salusjarvi L, Kankainen M, Soliymani R, Pitkanen J P, Penttila M, et al. (2008) Regulation of xylose metabolism in recombinant Saccharomyces cerevisiae. Microbial Cell Factories 7.
[0422] 3. Souto-Maior A M, Runquist D, Hahn-Hagerdal B (2009) Crabtree-negative characteristics of recombinant xylose-utilizing Saccharomyces cerevisiae. J Biotechnol 143: 119-123.
[0423] 4. Zaman S, Lippman S I, Zhao X, Broach J R (2008) How Saccharomyces Responds to Nutrients. Annual Review of Genetics 42: 27-81.
[0424] 5. Galazka J M, Tian C, Beeson W T, Martinez B, Glass N L, et al. (2010) Cellodextrin transport in yeast for improved biofuel production. Science 330: 84-86.
[0425] 6. Pelaez R, Herrero P, Moreno F (2010) Functional domains of yeast hexokinase 2. Biochem J 432: 181-190.
[0426] 7. Guthrie C, Fink G R. Amsterdam; Boston; London: Academic Press; 2002. Guide to yeast genetics and molecular and cell biology.
[0427] 8. Lundblad V, Hartzog G, Moqtaderi Z (2001) Manipulation of cloned yeast DNA. Curr Protoc Mol Biol Chapter 13: Unit13 10.
[0428] 9. Ozcan S, Johnston M (1999) Function and regulation of yeast hexose transporters. Microbiol. Mol Biol Rev 63: 554-569.
[0429] 10. Ozcan S, Dover J, Johnston M (1998) Glucose sensing and signaling by two glucose receptors in the yeast Saccharomyces cerevisiae. EMBO J. 17: 2566-2573.
[0430] 11. Gancedo J M (2008) The early steps of glucose signalling in yeast. FEMS Microbiol Rev 32: 673-704.
[0431] 12. Ramakrishnan V, Theodoris G, Bisson L F (2007) Loss of IRA2 suppresses the growth defect on low glucose caused by the snf3 mutation in Saccharomyces cerevisiae. FEMS Yeast Res 7: 67-77.
[0432] 13. Wang Y, Pierce M, Schneper L, Guldal C G, Zhang X, et al. (2004) Ras and Gpa2 mediate one branch of a redundant glucose signaling pathway in yeast. PLoS Biol 2: E128.
[0433] 14. Hong K K, Vongsangnak W, Vemuri G N, Nielsen J (2011) Unravelling evolutionary strategies of yeast for improving galactose utilization through integrated systems level analysis. Proc Natl Acad Sci USA 108: 12179-12184.
[0434] 15. Rolland F, De Winde J H, Lemaire K, Boles E, Thevelein J M, et al. (2000) Glucose-induced cAMP signalling in yeast requires both a G-protein coupled receptor system for extracellular glucose detection and a separable hexose kinase-dependent sensing process. Mol Microbiol 38: 348-358.
[0435] 16. Peeters T, Louwet W, Gelade R, Nauwelaers D, Thevelein J M, et al. (2006) Kelch-repeat proteins interacting with the Galpha protein Gpa2 bypass adenylate cyclase for direct regulation of protein kinase A in yeast. Proc Natl Acad Sci USA 103: 13034-13039.
[0436] 17. Urban J, Soulard A, Huber A, Lippman S, Mukhopadhyay D, et al. (2007) Sch9 is a major target of TORC1 in Saccharomyces cerevisiae. Molecular Cell 26: 663-674.
[0437] 18. Roosen J, Engelen K, Marchal K, Mathys J, Griffioen G, et al. (2005) PKA and Sch9 control a molecular switch important for the proper adaptation to nutrient availability. Mol Microbiol 55: 862-880.
[0438] 19. Ahuatzi D, Herrero P, de la Cera T, Moreno F (2004) The glucose-regulated nuclear localization of hexokinase 2 in Saccharomyces cerevisiae is Mig1-dependent. J Biol Chem 279: 14440-14446.
[0439] 20. Moreno F, Ahuatzi D, Riera A, Palomino C A, Herrero P (2005) Glucose sensing through the Hxk2-dependent signalling pathway. Biochem Soc Trans 33: 265-268.
[0440] 21. Liko D, Conway M K, Grunwald D S, Heideman W (2010) Stb3 plays a role in the glucose-induced transition from quiescence to growth in Saccharomyces cerevisiae. Genetics 185: 797-810.
[0441] 22. Szijgyarto Z, Garedew A, Azevedo C, Saiardi A (2011) Influence of inositol pyrophosphates on cellular energy dynamics. Science 334: 802-805.
[0442] 23. Rolland F, Baena-Gonzalez E, Sheen J (2006) Sugar sensing and signaling in plants: conserved and novel mechanisms. Annu Rev Plant Biol 57: 675-709.

1. A method for degrading cellodextrin, comprising:
a) providing a host cell comprising a recombinant cellodextrin transporter and a recombinant polypeptide comprising Y-x(2)-G-x-[KR]-E-N-[AG]-[AG]-[IV]-F-x(2)-[ANST]-[NST]-x(2)-[AIV]-x(2)-[AGT]-x(4)-[AG]-x(4)-[ADNS] (SEQ ID NO: 233), Y-Q-[CN]-M-[IV]-T-F-[CN]-[FILMV]-[AS]-RS-[ST]-[AS]-S-[FY]-[FY]-E-[STV]-G-x-[GS]-R-G-[IM]-G-F-R-D-S-[ACNS]-Q-D-[ILV]-[ILMV]-G-x-V-H-x-[IV]-P-[ADEST]-x-[AV]-[KR]-[AEQ]-x-[IL]-[FIL]-D (SEQ ID NO: 14), or G-x(2)-[FY]-x-N-[AGS]-x-[AS]-W-[APS]-V-[IL]-[AS]-x(2)-A-x(2)-[DE]-x-[AI]-x(3)-[LMV]-[DEN]-[ASV]-[ILV]-x(3)-L-x-T-x(2)-G-[ILV]-x(2)-[SV]-x-P-[AG] (SEQ ID NO: 15), wherein the recombinant polypeptide has cellodextrin phosphorylase activity; and
b) culturing the host cell in a medium comprising cellodextrin or a source of cellodextrin, whereby cellodextrin is transported into the cell and degraded by said recombinant polypeptide.

2. (canceled)

3. (canceled)

4. The method of claim 1, wherein the recombinant polypeptide comprises an amino acid sequence that has at least 29%, at least 30%, at least 35%, at least 40%, at least 45%, at least 50%, at least 55%, at least 60%, at least 65%, at least 70%, at least 75%, at least 80%, at least 85%, at least 90%, at least 95%, at least 99%, or at least 100% amino acid identity to the amino acid sequence of CDP_Clent, CDP_Ctherm, or CDP_Acell.

5. The method of claim 1, wherein the recombinant polypeptide has cellobiose phosphorylase activity.

6. The method of claim 5, wherein the recombinant polypeptide comprises an amino acid sequence that has at least 29%, at least 30%, at least 35%, at least 40%, at least 45%, at least 50%, at least 55%, at least 60%, at least 65%, at least 70%, at least 75%, at least 80%, at least 85%, at least 90%, at least 95%, at least 99%, or at least 100% amino acid identity to an amino acid sequence selected from the group consisting of SEQ ID NO: 11 (CgCBP), SEQ ID NO: 12 (SdCBP), and SEQ ID NO: 13 (CtCBP).

7. (canceled)

8. (canceled)

9. The method of claim 1, wherein the recombinant polypeptide comprises an amino acid substitution at one or more positions corresponding to positions of the amino acid sequence of SEQ ID NO: 12 (SdCBP), wherein the one or more amino acid substitutions are selected from the group consisting of an isoleucine (I) to glutamine (Q) substitution at a position corresponding to amino acid 409 of SEQ ID NO: 12; an isoleucine (I) to methionine (M) substitution at a position corresponding to amino acid 409 of SEQ ID NO: 12; an asparagine (N) to aspartate (D) substitution at a position corresponding to amino acid 482 of SEQ ID NO: 12; an asparagine (N) to threonine (T) substitution at a position corresponding to amino acid 482 of SEQ ID NO: 12; a cysteine (C) to serine (S) substitution at a position corresponding to amino acid 484 of SEQ ID NO: 12; a cysteine (C) to alanine (A) substitution at a position corresponding to amino acid 484 of SEQ ID NO: 12; a phenylalanie (F) to tryptophan (W) substitution at a position corresponding to amino acid 651 of SEQ ID NO: 12; a histidine (H) to asparagine (N) substitution at a position corresponding to amino acid 653 of SEQ ID NO: 12; a histidine (H) to alanine (A) substitution at a position corresponding to amino acid 653 of SEQ ID NO: 12; and combinations thereof.

10. The method of claim 1, wherein the host cell further comprises a recombinant phosphoglucomutase.

11. The method of claim 10, wherein the recombinant phosphoglucomutase comprises a conserved motif having the amino acid sequence of [GSA]-[LIVMF]-x-[LIVM]-[ST]-[PGA]-S-H-[NIC]-P (SEQ ID NO: 19).

12. The method of claim 1, wherein the host cell further comprises a recombinant hexokinase.

13. The method of claim 12, wherein the recombinant hexokinase comprises a conserved motif having the amino acid sequence of [LIVM]-G-F-[TN]-F-S-[FY]-P-x(5)-[LIVM]-[DNST]-x(3)-[LIVM]-x(2)-W-T-K-x-[LF] (SEQ ID NO: 20).

14. The method of claim 13, wherein the recombinant hexokinase is HXK1.

15.-150. (canceled)

151. A host cell comprising a recombinant cellodextrin transporter, and a recombinant polypeptide comprising G-x(2)-[FY]-x-N-[AGS]-x-[AS]-W-[APS]-V-[IL]-[AS]-x(2)-A-x(2)-[DE]-x-[AI]-x(3)-[LMV]-[DEN]-[ASV]-[ILV]-x(3)-L-x-T-x(2)-G-[ILV]-x(2)-[SV]-x-P-[AG] (SEQ ID NO: 14) or Y-Q-[CN]-M-[IV]-T-F-[CN]-[FILMV]-[AS]-R-[ST]-[AS]-S-[FY]-[FY]-E-[STV]-G-x-[GS]-R-G-[IM]-G-F-R-D-S-[ACNS]-Q-D-[ILV]-[ILMV]-G-x-V-H-x-[IV]-P-[ADEST]-x-[AV]-[KR]-[AEQ]-x-[IL]-[FIL]-D (SEQ ID NO: 15), wherein the recombinant polypeptide has cellodextrin phosphorylase activity.

152. The host cell of claim 151, wherein the recombinant polypeptide comprises an amino acid sequence that has at least 29%, at least 30%, at least 35%, at least 40%, at least 45%, at least 50%, at least 55%, at least 60%, at least 65%, at least 70%, at least 75%, at least 80%, at least 85%, at least 90%, at least 95%, at least 99%, or at least 100% amino acid identity to the amino acid sequence of CDP_Clent, CDP_Ctherm, or CDP_Acell.

153. The host cell of claim 151, wherein the recombinant polypeptide has cellobiose phosphorylase activity.

154. The host cell of claim 153, wherein the recombinant polypeptide comprises an amino acid sequence that has at least 29%, at least 30%, at least 35%, at least 40%, at least 45%, at least 50%, at least 55%, at least 60%, at least 65%, at least 70%, at least 75%, at least 80%, at least 85%, at least 90%, at least 95%, at least 99%, or at least 100% amino acid identity to an amino acid sequence selected from the group consisting of SEQ ID NO: 11 (CgCBP), SEQ ID NO: 12 (SdCBP), and SEQ ID NO: 13 (CtCBP).

155. (canceled)

156. (canceled)

157. The host cell of claim 151, wherein the recombinant polypeptide comprises an amino acid substitution at one or more positions corresponding to positions of the amino acid sequence of SEQ ID NO: 12 (SdCBP), wherein the one or more amino acid substitutions are selected from the group consisting of an isoleucine (I) to glutamine (Q) substitution at a position corresponding to amino acid 409 of SEQ ID NO: 12; an isoleucine (I) to methionine (M) substitution at a position corresponding to amino acid 409 of SEQ ID NO: 12; an asparagine (N) to aspartate (D) substitution at a position corresponding to amino acid 482 of SEQ ID NO: 12; an asparagine (N) to threonine (T) substitution at a position corresponding to amino acid 482 of SEQ ID NO: 12; a cysteine (C) to serine (S) substitution at a position corresponding to amino acid 484 of SEQ ID NO: 12; a cysteine (C) to alanine (A) substitution at a position corresponding to amino acid 484 of SEQ ID NO: 12; a phenylalanie (F) to tryptophan (W) substitution at a position corresponding to amino acid 651 of SEQ ID NO: 12; a histidine (H) to asparagine (N) substitution at a position corresponding to amino acid 653 of SEQ ID NO: 12; a histidine (H) to alanine (A) substitution at a position corresponding to amino acid 653 of SEQ ID NO: 12; and combinations thereof.

158. The host cell of claim 151, wherein the host cell further comprises a recombinant phosphoglucomutase.

159. The host cell of claim 158, wherein the recombinant phosphoglucomutase comprises a conserved motif having the amino acid sequence of [GSA]-[LIVMF]-x-[LIVM]-[ST]-[PGA]-S-H-[NIC]-P (SEQ ID NO: 19).

160. The host cell of claim 151, wherein the host cell further comprises a recombinant hexokinase.

161. The host cell of claim 160, wherein the recombinant hexokinase comprises a conserved motif having the amino acid sequence of [LIVM]-G-F-[TN]-F-S-[FY]-P-x(5)-[LIVM]-[DNST]-x(3)-[LIVM]-x(2)-W-T-K-x-[LF] (SEQ ID NO: 20).

162. The host cell of claim 161, wherein the recombinant hexokinase is HXK1.

163-279. (canceled)

280. The method of claim 1, wherein hydrocarbons or hydrocarbon derivatives are produced from the cellodextrin.

The application's sequence listing, which the Patent Office published only in electronic form, follows.

SEQUENCE LISTING (265 sequences)

SEQ ID NO: 1 - protein, 18 aa, Artificial Sequence
  Sequence motif
  VARIANT 1: Xaa = Leu or Ile or Val or Met
  VARIANT 3: Xaa = Phe or Leu
  VARIANT 4, 5, 6, 7, 8, 9, 10, 11, 12, 13, 14, 15, 16: Xaa = Any Amino Acid
  VARIANT 17: Xaa = Tyr or Phe
XYXXXXXXXXXXXXXXXD

SEQ ID NO: 2 - protein, 17 aa, Artificial Sequence
  Sequence motif
  VARIANT 1: Xaa = Tyr or Phe
  VARIANT 2, 3, 5, 6, 7, 8, 9, 11, 12, 13, 14, 15, 16: Xaa = Any Amino Acid
  VARIANT 10: Xaa = Pro or Val or Phe
  VARIANT 17: Xaa = Asp or Gln
XXXGXXXXXXXXXXXXX

SEQ ID NO: 3 - protein, 3 aa, Artificial Sequence
  Sequence motif
  VARIANT 3: Xaa = Arg or Lys
GRX

SEQ ID NO: 4 - protein, 9 aa, Artificial Sequence
  Sequence motif
  VARIANT 2, 3, 4, 5, 6, 7: Xaa = Any Amino Acid
  VARIANT 8: Xaa = Tyr or Phe
RXXXXXXXN

SEQ ID NO: 5 - protein, 8 aa, Artificial Sequence
  Sequence motif
  VARIANT 3: Xaa = Ile or Val or Leu or Ala
  VARIANT 5, 6, 7: Xaa = Any Amino Acid
WRXPXXXQ

SEQ ID NO: 6 - protein, 24 aa, Artificial Sequence
  Sequence motif
  VARIANT 6, 8, 9, 10, 11, 12, 13, 14, 15, 17, 18, 19, 21, 22: Xaa = Any Amino Acid
PESPRXLXXXXXXXXAXXXLXXYH

SEQ ID NO: 7 - protein, 9 aa, Artificial Sequence
  Sequence motif
  VARIANT 2: Xaa = Gly or Ser or Thr
  VARIANT 4, 8: Xaa = Any Amino Acid
  VARIANT 9: Xaa = Leu or Ile or Val
FXQXSGNXX

SEQ ID NO: 8 - protein, 18 aa, Artificial Sequence
  Sequence motif
  VARIANT 2, 3, 4, 6, 7, 9, 11, 12, 13, 14: Xaa = Any Amino Acid
  VARIANT 5: Xaa = Tyr or Ile or Val
  VARIANT 16: Xaa = Gly or Ala
LXXXXXXEXLXXXXRXKG

SEQ ID NO: 9 - protein, 579 aa, Neurospora crassa
MSSHGSHDGASTEKHLATHDIAPTHDAIKIVPKGHGQTATKPGAQEKEVRNAALFAAIKESNIKPWSKESIHLYFAIFVAFCCACANGYDGSLMTGIIAMDKFQNQFHTGDTGPKVSVIFSLYTVGAMVGAPFAAILSDRFGRKKGMFIGGIFIIVGSIIVASSSKLAQFVVGRFVLGLGIAIMTVAAPAYSIEIAPPHWRGRCTGFYNCGWFGGSIPAACITYGCYFIKSNWSWRIPLILQAFTCLIVMSSVFFLPESPRFLFANGRDAEAVAFLVKYHGNGDPNSKLVLLETEEMRDGIRTDGVDKVWWDYRPLFMTHSGRWRMAQVLMISIFGQFSGNGLGYFNTVIFKNIGVTSTSQQLAYNILNSVISAIGALTAVSMTDRMPRRAVLIIGTFMCAAALATNSGLSATLDKQTQRGTQINLNQGMNEQDAKDNAYLHVDSNYAKGALAAYFLFNVIFSFTYTPLQGVIPTEALETTIRGKGLALSGFIVNAMGFINQFAGPIALHNIGYKYIFVFVGWDLIETVAWYFFGVESQGRTLEQLEWVYDQPNPVKASLKVEKVVVQADGHVSEAIVA

SEQ ID NO: 10 - protein, 525 aa, Neurospora crassa
MGIFNKKPVAQAVDLNQIQEEAPQFERVDWKKDPGLRKLYFYAFILCIASATTGYDGMFFNSVQNFETWIKYFGDPRGSELGLLGALYQIGSIGSIPFVPLLTDNFGRKTPIIIGCVIMIVGAVLQATAKNLDTFMGGRTMLGFGNSLAQIASPMLLTELAHPQHRARLTTIYNCLWNVGALVVSWLAFGTNYINNDWSWRIPALLQAFPSIIQLLGIWWVPESPRFLIAKDKHDEALHILAKYHANGDPNHPTVQFEFREIKETIRLEMESTKNSSYLDFFKSRGNRYRLAILLSLGFFSQWSGNAIISNYSSKLYETAGVTDSTAKLGLSAGQTGLALIVSVTMALLVDKLGRRLAFLASTGGMCGTFVIWTLTAGLYGEHRLKGADKAMIFFIWVFGIFYSLAWSGLLVGYAIEILPYRLRGKGLMVMNMSVQCALTLNTYANPVAFDYFGPDHSWKLYLIYTCWIAAEFVFVFFMYVETKGPTLEELAKVIDGDEADVAHIDIHQVEKEVEIHEHEGKSVA

SEQ ID NO: 11 - protein, 842 aa, Celvibrio gilvus
MGSSHHHHHHSSGLVPRGSHMRYGHFDDAAREYVITTPHTPYPWINYLGSEQFFSLLSHQAGGYSFYRDAKMRRLTRYRYNNIPADAGGRYLYVNDGGDVWTPSWLPVKADLDHFEARHGLGYSRITGERNGLKVETLFFVPLGENAEVQKVTVTNTSDAPKTATLFSFVEFCLWNAQDDQTNYQRNLSIGEVEVEQDGPHGSAIYHKTEYRERRDHYAVFGVNTRADGFDTDRDTFVGAYNSLGEASVPRAGKSADSVASGWYPIGSHSVAVTLQPGESRDLVYVLGYLENPDEEKWADDAHQVVNKAPAHALLGRFATSEQVDAALEALNSYWTNLLSTYSVSSTDEKLDRMVNIWNQYQCMVTFNMSRSASFFETGIGRGMGFRDSNQDLLGFVHLIPERARERIIDIASTQFADGSAYHQYQPLTKRGNNDIGSGFNDDPLWLIAGVAAYIKESGDWGILDEPVPFDNEPGSEVPLFEHLTRSFQFTVQNRGPHGLPLIGRADWNDCLNLNCFSTTPGESFQTTENQAGGVAESVFIAAQFVLYGAEYATLAERRGLADVATEARKYVDEVRAAVLEHGWDGQWFLRAYDYYGNPVGTDAKPEGKIWIEPQGFAVMAGIGVGEGPDDADAPAVKALDSVNEMLGTPHGLVLQYPAYTTYQIELGEVSTYPPGYKENGGIFCHNNPWVIIAETVVGRGAQAFDYYKRITPAYREDISDTHKLEPYVYAQMIAGKEAVRAGEAKNSWLTGTAAWNFVAVSQYLLGVRPDYDGLVVDPQIGPDVPSYTVTRVARGATYEITVTNSGAPGARASLTVDGAPVDGRTVPYAPAGSTVRVEVTV

SEQ ID NO: 12 - protein, 811 aa, Sacharophagus degradans
MKFGHFDDKAREYVITDPKTPYPWINYLGNEDFFSLVSNTGGGYSFYKDAKFRRLTRYRYNNVPVDNGGKYFYINDSGDVWSPGWKPVKAELDAYSCAHGLSYTRITGERNGIQAEVLSFIPLGTWAEIQKVSLKNTSGATKKFKLFSFAEWCLWNAEDDMTNFQRNFSTGEVEVEDSVIYHKTEFKERRNHYAFYSVNAPIQGFDTDRDKWKGLYNDFDKPDAVFEGEPRNSEAHGWSPIASHYLEVELAPGESKDLIFVLGYIEVAPENKWESKGVINKSPAKELIARFDSVEKVDAELTKLADYWANLLSTYSVESGDEKLDRMVNIWNQYQCMVTFNMSRSASFFESGIGRGMGFRDSNQDLIGFVHQVPERARERIIDIASTQFEDGSAYHQYQPLTKRGNNAIGGNFNDDPLWLILSTTDYIKETGDFSILEEQVPYDNDASKATSHFEHLKRSFYHTVNNLGPHGLPLIGRADWNDCLNLNCFSEDPNESFQTTGNKTGRTAESLMIAGLFVLYGNEFVKLCREIGQDGEAAEAQAHIDQMVEAVKKHGWDGEWFLRAYDYYGKKVGSKENEEGKIFIESQGFCGMAGIGLEDGLVEKSMDSVKEWLDCDYGIVLQQPAFTKYYIEYGEISTYPAGYKENAGIFCHNNPWIMITETLLGRGDKAFEYYRKIAPAYLEEISDLHKVEPYAYCQMIAGKDAYLPGEGKNSWLTGTASWNFAAITQYILGVKPDYSGLAINPCIPSSWDGFKVTRKYRGATYNIIVTNPTHVSKGVKSLTLNGNAIDGYIVPPQQAGTVCNVEVTLG

SEQ ID NO: 13 - protein, 811 aa, Clostridium thermocellum
MKFGFFDDANKEYVITVPRTPYPWINYLGTENFFSLISNTAGGYCFYRDARLRRITRYRYNNVPIDMGGRYFYIYDNGDFWSPGWSPVKRELESYECRHGLGYTKIAGKRNGIKAEVTFFVPLNYNGEVQKLILKNEGQDKKKITLFSFIEFCLWNAYDDMTNFQRNFSTGEVEIEGSVIYHKTEYRERRNHYAFYSVNAKISGFDSDRDSFIGLYNGFDAPQAVVNGKSNNSVADGWAPIASHSIEIELNPGEQKEYVFIIGYVENKDEEKWESKGVINKKKAYEMIEQFNTVEKVDKAFEELKSYWNALLSKYFLESHDEKLNRMVNIWNQYQCMVTFNMSRSASYFESGIGRGMGFRDSNQDLLGFVHQIPERARERLLDLAATQLEDGGAYHQYQPLTKKGNNEIGSNFNDDPLWLILATAAYIKETGDYSILKEQVPFNNDPSKADTMFEHLTRSFYHVVNNLGPHGLPLIGRADWNDCLNLNCFSTVPDESFQTTTSKDGKVAESVMIAGMFVFIGKDYVKLCEYMGLEEEARKAQQHIDAMKEAILKYGYDGEWFLRAYDDFGRKVGSKENEEGKIFIESQGFCVMAEIGLEDGKALKALDSVKKYLDTPYGLVLQNPAFTRYYIEYGEISTYPPGYKENAGIFCHNNAWIICAETVVGRGDMAFDYYRKIAPAYIEDVSDIHKLEPYVYAQMVAGKDAKRHGEAKNSWLTGTAAWNFVAISQWILGVKPDYDGLKIDPCIPKAWDGYKVTRYFRGSTYEITVKNPNHVSKGVAKITVDGNEISGNILPVFNDGKTHKVEVIMG

SEQ ID NO: 14 - protein, 50 aa, Artificial Sequence
  Sequence motif
  VARIANT 3: Xaa = Cys or Asn
  VARIANT 5: Xaa = Ile or Val
  VARIANT 8: Xaa = Cys or Asn
  VARIANT 9: Xaa = Phe or Ile or Leu or Met or Val
  VARIANT 10, 13: Xaa = Ala or Ser
  VARIANT 12: Xaa = Ser or Thr
  VARIANT 15, 16: Xaa = Phe or Tyr
  VARIANT 18: Xaa = Ser or Thr or Val
  VARIANT 21: Xaa = Gly or Ser
  VARIANT 24: Xaa = Ile or Met
  VARIANT 30: Xaa = Ala or Cys or Asn or Ser
  VARIANT 33: Xaa = Ile or Leu or Val
  VARIANT 34: Xaa = Ile or Leu or Met or Val
  VARIANT 40: Xaa = Ile or Val
  VARIANT 42: Xaa = Ala or Asp or Glu or Ser or Thr
  VARIANT 44: Xaa = Ala or Val
  VARIANT 45: Xaa = Lys or Arg
  VARIANT 46: Xaa = Ala or Glu or Gln
  VARIANT 48: Xaa = Ile or Leu
  VARIANT 49: Xaa = Phe or Ile or Leu
  VARIANT 20, 36, 39, 43, 47: Xaa = Any Amino Acid
YQXMXTFXXXRXXSXXEXGXXRGXGFRDSXQDXXGXVHXXPXXXXXXXXD

SEQ ID NO: 15 - protein, 45 aa, Artificial Sequence
  Sequence motif
  VARIANT 4: Xaa = Phe or Tyr
  VARIANT 7: Xaa = Ala or Gly or Ser
  VARIANT 9, 14: Xaa = Ala or Ser
  VARIANT 11: Xaa = Ala or Pro or Ser
  VARIANT 13: Xaa = Ile or Leu
  VARIANT 20: Xaa = Asp or Glu
  VARIANT 22: Xaa = Ala or Ile
  VARIANT 26: Xaa = Leu or Met or Val
  VARIANT 27: Xaa = Asp or Glu or Asn
  VARIANT 28: Xaa = Ala or Ser or Val
  VARIANT 29, 39: Xaa = Ile or Leu or Val
  VARIANT 42: Xaa = Ser or Val
  VARIANT 45: Xaa = Ala or Gly
  VARIANT 2, 3, 5, 8, 15, 16, 18, 19, 21, 23, 24, 25, 30, 31, 32, 34, 36, 37, 40, 41, 43: Xaa = Any Amino Acid
GXXXXNXXXWXVXXXXAXXXXXXXXXXXXXXXLXTXXGXXXXXPX

SEQ ID NO: 16 - protein, 15 aa, Artificial Sequence
  Sequence motif
  VARIANT 3: Xaa = Phe or Tyr or Trp or Met
  VARIANT 4, 6, 8, 9, 15: Xaa = Gly or Ser or Thr or Ala
  VARIANT 10: Xaa = Phe or Tyr or Asn or His
  VARIANT 11: Xaa = Asn or Gln
  VARIANT 2, 5, 7, 12, 14: Xaa = Any Amino Acid
FXXXXXXXXXXXEXX

SEQ ID NO: 17 - protein, 9 aa, Artificial Sequence
  Sequence motif
  VARIANT 1: Xaa =  Leu or Ile or Val or Met or Phe or Ser or Thr or Cys
  VARIANT 2: Xaa =  Leu or Ile or Val or Phe or Tyr or Ser
  VARIANT 3: Xaa =  Leu or Ile or Val
  VARIANT 4: Xaa =  Leu or Ile or Val or Met or Ser or Thr
  VARIANT 8: Xaa =  Leu or Ile or Val or Met or Phe or Ala or Arg
  VARIANT 9: Xaa =  Cys or Ser or Ala or Gly or Asn
XXXXENGXX

SEQ ID NO: 18 - protein, 15 aa, Artificial Sequence
  Sequence motif
  VARIANT 3: Xaa =  Phe or Tyr or Trp or Met
  VARIANT 4, 6, 8, 9, 15: Xaa =  Gly or Ser or Thr or Ala
  VARIANT 10: Xaa =  Phe or Tyr or Asn or His
  VARIANT 11: Xaa =  Asn or Gln
  VARIANT 2, 5, 7, 12, 14: Xaa = Any Amino Acid
FXXXXXXXXXXXEXX

SEQ ID NO: 19 - protein, 10 aa, Artificial Sequence
  Sequence motif
  VARIANT 1: Xaa =  Gly or Ser or Ala
  VARIANT 2: Xaa =  Leu or Ile or Val or Met or Phe
  VARIANT 4: Xaa =  Leu or Ile or Val or Met
  VARIANT 5: Xaa =  Ser or Thr
  VARIANT 6: Xaa =  Pro or Gly or Ala
  VARIANT 9: Xaa =  Asn or Ile or Cys
  VARIANT 3: Xaa = Any Amino Acid
XXXXXXSHXP

SEQ ID NO: 20 - protein, 26 aa, Artificial Sequence
  Sequence motif
  VARIANT 1, 14, 19: Xaa =  Leu or Ile or Val or Met
  VARIANT 4: Xaa =  Thr or Asn
  VARIANT 7: Xaa =  Phe or Tyr
  VARIANT 15: Xaa =  Asp or Asn or Ser or Thr
  VARIANT 26: Xaa =  Leu or Phe
  VARIANT 9, 10, 11, 12, 13, 16, 17, 18, 20, 21, 25: Xaa = Any Amino Acid
XGFXFSXPXXXXXXXXXXXXXWTKXX

SEQ ID NO: 21 - DNA, 2529 bp, Celvibrio gilvus
atgggatcatctcaccaccatcatcatcattcctcaggtcttgttcctagaggatcacatatgaggtacggacatttcgatgatgcagcaagagaatacgttatcactactccacacactccttatccttggattaactatctgggctctgaacagtttttctctctgttatctcatcaagctgggggatactctttctatagggatgcaaagatgagaagattgacaagatacagatacaacaatatccctgccgatgcaggtggaagatacctatacgttaatgacggtggcgacgtttggaccccatcatggctaccagttaaagctgaccttgaccattttgaagctcgtcatggactgggctatagtagaattaccggcgaaaggaacgggctaaaagttgaaacattgtttttcgtaccattaggcgagaatgcagaagtacagaaggtaacagtcacaaatacttctgatgctccaaaaactgccacacttttctcttttgtcgagttttgcctatggaatgctcaagatgatcaaaccaattaccagagaaacttgtctatcggtgaggtcgaagtggaacaagatggtccacatggctctgcaatctaccataagacagaatacagagaacgtagagatcactacgccgtgtttggtgtcaatacaagagctgatggatttgacacagacagagatacctttgtaggtgcctacaattcacttggagaagcatccgttccaagagccggtaagtccgctgattcagtcgcctctggatggtatcctataggttcacatagtgtagccgttactttgcaacctggcgagtccagagatttggtctatgtgttgggctacttagaaaaccctgatgaagagaaatgggctgacgatgcacaccaagtggttaacaaagcaccagcacacgctctgttaggtaggttcgctacatctgaacaagttgacgctgcactagaagcattgaactcttattggacaaacttattgagtacttactccgtttcatccactgacgaaaagctggacagaatggtgaatatctggaatcaataccaatgtatggttactttcaatatgtcaagatcagcatcctttttcgagacaggtattggccgtggaatgggctttagagactctaatcaagaccttttaggtttcgtgcatcttatacctgaacgtgctagagaaaggatcattgatattgcatcaacacagtttgcagatggttcagcatatcatcagtaccaacctttaactaaaagaggtaacaacgacataggttccgggtttaacgatgatccattgtggctaatcgctggcgtagctgcctatatcaaagagtctggtgattggggtattctagatgagccagttccattcgataatgaaccagggtctgaagtgccactattcgaacacttaactagatcttttcaattcaccgttcagaatagaggaccacatgggttaccattgattggcagagccgactggaatgattgtttgaatcttaactgtttctcaactacaccaggagagtcttttcaaactacagaaaaccaggctggaggtgtcgcagagtctgttttcatagctgctcaatttgtgttgtatggcgcagaatatgctactttagcagaaaggagaggtttggctgatgttgctactgaggctagaaagtacgtggacgaggttagagctgctgtgttggaacacggttgggatggtcaatggtttttgagagcctacgactactacggaaatccagttggtaccgatgccaaaccagagggaaagatctggatagaaccacaagggtttgccgtaatggcaggcattggtgtaggtgagggccctgatgatgccgatgcccctgccgtcaaggctttagatagtgttaacgagatgttaggcacaccacatggtcttgtcctgcaataccctgcatacactacttaccaaatagaactgggggaagtatctacttaccctcctggatacaaggaaaatggtggtatcttttgccacaataacccatgggttatcatagctgaaactgttgtcggtagaggggctcaagcatttgattactataagagaattactcctgcctacagagaggacatctcagatacacacaaattggaaccatatgtttatgctcaaatgattgctggaaaggaagctgtccgtgcaggggaagccaaaaactcatggttaaccggtaccgctgcatggaactttgtcgctgtatctcaatacctacttggtgtcaggccagactacgatggcctagttgtcgatcctcaaattgggccagacgtgccaagttacacagttacccgtgtagcaagaggtgctacttatgaaatcacagttacaaatagtggtgctcctggagctagagctagtttgacagtagacggcgctcctgttgatgggagaacagttccttacgccccagcaggatctactgtgagagtcgaagtgacagtataa

SEQ ID NO: 22 - DNA, 2436 bp, Sacharophagus degradans
atgaaattcgggcactttgatgataaagcaagagagtacgttatcactgacccaaaaacaccttatccttggataaactatcttggtaatgaggactttttctcattggtttctaatacaggcggtggttactccttctataaggacgccaaattcaggagactaaccagatacagatacaacaatgttccagtcgataatggtggcaaatacttttacattaacgactctggagatgtgtggtcaccaggatggaagcctgtgaaggcagaactagatgcatactcatgcgctcatggtttgagttatactagaattacaggtgagagaaatggtatacaagccgaggtactttcattcattccattaggtacctgggcagaaatacaaaaagtgtctttgaaaaacacatctggagccaccaaaaagttcaaactgttttcatttgctgaatggtgtttatggaatgcagaagatgacatgaccaactttcagagaaacttttccaccggtgaagtggaggtagaagattctgtcatctaccataagacagagttcaaagagcgtagaaatcattatgctttctacagtgtcaatgcaccaatacagggtttcgatactgatagagacaaatggaaaggcttgtacaatgattttgacaaacctgacgcagtatttgaaggtgaacctagaaattcagaagcacacggctggtcccctatcgcttcccattatcttgaagtagaattggcccctggggagtctaaggatcttatcttcgtattaggctacattgaagtcgcccctgaaaacaaatgggaatcaaaaggtgttatcaacaaatccccagccaaggaactaatcgctcgttttgattctgtagagaaagtggatgctgaattgactaagttagctgactattgggctaacttgctatctacttattccgttgaatctggggatgagaaactggacagaatggttaacatttggaaccaataccaatgcatggtaacattcaatatgtctagatctgcatcctttttcgagtcaggaattggcaggggcatgggttttagagattctaatcaagacttgataggctttgtacaccaagtaccagaaagagcaagagaacgtatcatcgacatagcttccactcaatttgaagatggatctgcttaccatcaataccagcctttaactaaaagaggcaataacgcaattgggggtaactttaacgatgatccattatggttgattttgagtaccactgattacatcaaggaaactggagatttctccattctggaggaacaagttccttacgataatgatgcctcaaaggccacttcacattttgaacacttgaaaagatccttttaccatactgttaacaatcttggacctcatggcttgccactgatcggtagagctgactggaatgattgccttaatctgaattgtttttctgaagatcctaacgagtcattccagactacaggcaataagacaggtagaacagccgagtcactaatgatcgccggattgttcgtgttatacggtaatgaatttgtgaaattgtgtcgtgaaattggtcaagacggagaagctgccgaagcacaagctcatatcgaccaaatggttgaagccgtcaaaaagcacggatgggacggtgaatggttccttagagcttacgattactacggcaaaaaggttggttctaaggaaaatgaggaaggtaagattttcattgaatctcaaggtttttgtggtatggcagggattggtttagaagatggtttggttgaaaagtctatggattctgttaaggaatggttagattgtgattacggtatagttctacaacagccagcttttacaaagtactatatcgaatatggtgaaatctcaacttatccagccgggtacaaagagaatgctggaatcttttgtcataacaacccatggattatgataacagaaacactattaggaagaggcgacaaggctttcgagtactataggaaaatcgcacctgcatacctggaagagatttctgacttgcataaagtggaaccatacgcttattgtcaaatgatagctggaaaagatgcttacttaccaggagaaggcaaaaacagttggttaacagggactgcatcatggaatttcgctgctattacacagtacattctaggtgtcaaaccagattactctgggttggctatcaacccatgtattccatctagttgggatggattcaaagtcaccagaaagtaccgtggggcaacttacaacataatcgtgacaaatccaactcacgtttctaagggggttaagtcattaacactgaatggcaatgccatcgacggctacatcgtcccaccacaacaagcaggtaccgtttgcaatgtcgaggtaacacttggataa

SEQ ID NO: 23 - DNA, 2436 bp, Clostridium thermocellum
atgaagtttggctttttcgatgatgccaataaggaatatgttatcacagtgccaaggacaccttatccttggattaactatctaggaactgaaaactttttctctcttatcagtaataccgcaggtggctactgcttctatagggacgcaagattacgtagaattactcgttacagatacaacaatgttccaattgacatgggaggtaggtacttctatatctacgataacggtgatttctggagtccaggatggtcaccagtgaagagagaattggaatcatatgaatgtcgtcatggcttgggatacacaaagatagccggtaagagaaatggcattaaggcagaagttacctttttcgttccactgaattacaatggcgaagtgcagaaactgatcttgaaaaacgaaggtcaagacaaaaagaagattacactgttttcattcattgagttttgtttgtggaatgcttacgatgacatgaccaactttcaaaggaatttctctacaggagaggtcgagattgaagggtcagttatctaccacaaaacagagtatagagaacgtagaaatcattacgccttttactcagtcaacgctaagatttctgggtttgattccgacagagattcattcatcggtctatacaatggatttgatgctccacaagccgtcgttaatggtaagtccaacaattcagtcgcagatggttgggcacctatagcttcccactctattgagatcgaacttaatcctggtgaacaaaaggaatatgtgttcatcataggctacgtcgaaaacaaggacgaagagaagtgggaatccaaaggcgtgataaacaaaaagaaagcctatgagatgatagaacagtttaacacagtagaaaaagtagacaaagccttcgaggaattgaaatcatattggaatgcactgttatcaaagtatttcctagaatcccatgatgaaaagttaaacagaatggtgaatatctggaatcaatatcaatgcatggttacctttaacatgagtagatctgcatcttactttgaatctggtataggtagagggatgggctttagagattctaatcaagacctgcttggtttcgttcatcaaattcctgaaagagctagagaaaggttgcttgatctagctgccactcagttggaagatggtggtgcataccatcaataccagccattaaccaaaaaggggaacaatgagattggaagtaactttaacgacgaccctttatggttaatcctagcaactgctgcttacatcaaagagacaggagattactcaatacttaaagagcaagttccattcaacaatgatccatctaaagccgatactatgtttgaacatctgactagatctttctaccacgtagtaaacaatcttggaccacacggtttaccactaatcggtagagctgactggaacgattgtttgaatttgaattgcttctctactgtacctgatgaaagtttccaaactacaacatcaaaagatgggaaagttgcagaatctgtaatgatagctggcatgttcgtgtttatcggcaaagattatgtcaagttgtgcgaatacatgggtcttgaagaggaagctagaaaagcacaacaacatattgatgctatgaaagaggctatcttaaagtacggatacgacggtgaatggtttttgagagcttatgacgacttcgggagaaaagtcggttctaaagagaacgaggaaggaaagatctttatcgaatcccaaggtttttgtgttatggccgaaataggcttagaagatggaaaagcactaaaggctctagattctgtcaaaaagtatttggatacaccatacggcttagttttacagaatcctgcattcacaagatactacattgaatacggcgaaatcagtacttacccaccaggttacaaggaaaatgctggcatcttttgtcataacaatgcttggattatctgcgctgagacagtagttggcagaggtgatatggcttttgattactacagaaagatcgcacctgcttacattgaggacgtttctgatattcacaagttggaaccatatgtgtacgcacaaatggtagcaggtaaggacgccaaaagacatggggaagccaaaaactcttggctgactggtacagccgcttggaatttcgtagccatttcccaatggatattgggtgttaaaccagattacgatggattgaaaatcgacccttgtattccaaaagcatgggatggttacaaagtcactagatactttagaggttctacctacgaaatcacagtgaaaaacccaaatcatgtctccaaaggtgttgcaaagataacagttgatgggaacgagatctcaggaaacatcttgccagttttcaatgatggcaagactcataaagtagaagtgattatgggataa

SEQ ID NO: 24 - protein, 811 aa, Clostridium thermocellum; identical to SEQ ID NO: 13

SEQ ID NO: 25 - protein, 811 aa, Clostridium thermocellum
MKFGFFDDANKEYVITVPRTPYPWINYLGTENFFSLISNTAGGYCFYRDARLRRITRYRYNNVPIDMGGRYFYIYDNGDFWSPGWSPVKRELESYECRHGLGYTKIAGKRNGIKAEVTFFVPLNYNGEVQKLILKNEGQDKKKITLFSFIEFCLWNAYDDMTNFQRNFSTGEVEIEGSVIYHKTEYRERRNHYAFYSVNAKISGFDSDRDSFIGLYNGFDAPQAVVNGKSNNSVADGWAPIASHSIEIELNPGEQKEYVFIIGYVENKDEEKWESKGVINKKKAYEMIEQFNTVEKVDKAFEELKSYWNALLSKYFLESHDEKLNRMVNIWNQYQCMVTFNMSRSASYFESGIGRGMGFRDSNQDLLGFVHQIPERARERLLDLAATQLEDGSAYHQYQPLTKKGNNEIGSNFNDDPLWLILATAAYIKETGDYSILKEQVPFNNDPSKADTMFEHLTRSFYHVVNNLGPHGLPLIGRADWNDCLNLNCFSTVPDESFQTTTSKDGKVAESVMIAGMFVFIGKDYVKLCEYMGLEEEARKAQQHIDAMKEAILKYGYDGEWFLRAYDDFGRKVGSKENEEGKIFIESQGFCVMAEIGLEDGKALKALDSVKKYLDTPYGLVLQNPAFTRYYIEYGEISTYPPGYKENAGIFCHNNAWIICAETVVGRGDMAFDYYRKIAPAYIEDVSDIHKLEPYVYAQMVAGKDAKRHGEAKNSWLTGTAAWNFVAISQWILGVKPDYDGLKIDPCIPKAWDGYKVTRYFRGSTYEITVKNPNHVSKGVAKITVDGNEISGNILPVFNDGKTHKVEVIMG

SEQ ID NO: 26 - protein, 807 aa, Clostridium thermocellum
MKFGFFDDANKEYVITVPRTPYPWINYLGTENFFSLISNTAGGYCFYRDARLRRITRYRYNNVPIDMGGRYFYIYDNGDFWSPGWSPVKRELESYECRHGLGYTKIAGKRNGIKAEVTFFVPLNYNGEVQKLILKNEGQDKKKITLFSFIEFCLWNAYDDMTNFQRNFSTGEVEIEGSVIYHKTEYRERRNHYAFYSVNAKISGFDSDRDSFIGLYNGFDAPQAVVNGKSNNSVADGWAPIASHSIEIELNPGEQKEYVFIIGYVENKDEEKWESKGVINKKKAYEMIEQFNTVEKVDKAFEELKSYWNALLSKYFLESHDEKLNRMVNIWNQYQCMVTFNMSRSASYFESGIGRGMGFRDSNQDLLGFVHQIPARARERLLDLAATQLEDGGAYHQYQPLTKKGNNEIGSNFNDDPLWLILATAAYIKETGDYSILKEQVPFNNDPSKADTMFEHLTRSFYHVVNNLGPHGLPLIGRADWNDCLNLNCFSTVPDESFQTTTSKDGKVAESVMIAGMFVFIGKDYVKLCEYMGLEEEARKAQQHIDAMKEAILKYGYDGEWFLRAYDDFGRKVGSKENEEGKIFIESQGFCVMAEIGLEDGKALKALDSVKKYLDTPYGLVLQNPAFTRYYIEYGEISTYPPGYKENAGIFCHNNAWIICAETVVGRGDMAFDYYRKIAPAYIEDVSDIHKLEPYVYAQMVAGKDAKRHGEAKNSWLTGTAAWNFVAISQWILGVKPDYDGLKIDPCIPKAWDGYKVTRYFRGSTYEITVKNPNHVSKGVAKITVDGNEISGNILPVFNDGKTHKLK

SEQ ID NO: 27 - protein, 811 aa, Acetivibrio cellulolyticus
MKFGFFDDLNKEYVITSPTTPYPWINYLGTQEFFSLISNTAGGYTFYRDAKLRRLTRYRYNNVPIDMGGRYFYIYDNGDFWSPGWAPVKKELESYECRHGLGYTRITGKRNGISTEVTFFVPQNYNGEVQKVVIKNEGTATKKITLFSFQEWCLWNAQDDTTNFQRNFSTGEVEIEGSVIYHKTEYKERRNHYAFYSVNEPITGFDSDRDSFIGLYNGFEAPKAVVAGKSNNSVADGWSPVASHSLDIELKAGEKKELVFILGYVENKEEEKWESKGVINKKKAKEMIAQFKTSADVDKAFDQLKEYWNSLLSQYTIKSHDEKLDRMVNIWNQYQCMVTFNMSRSASYFESGIGRGMGFRDSNQDLLGFVHQIPERAKERLLDIAATQLEDGGAYHQYQPLTKKGNNEIGGNFNDDPLWLIMAAAAYIKETGDFSILKEQVPYDNDMSKATTFFEHLKRSFDHVTNNLGPHGLPLIGRADWNDCLNLNCFSSTPDESFQTTTSKDGKVAESVMIAGMFVYTGADYVKLCEYMGFADEAKKAQKQIEDMKATVLKYGYDGEWFLRAYDDFGKKIGSNENEEGKIFIESQGFCVMAGIGLEDGKALKAMDSVKKYLDTPYGIVLNNPAFTKYYIEYGEISTYPAGYKENAGIFCHNNAWIMCAETVVGRGDMAFEYYSKIAPAYTEDISDVHKTEPYVYAQMIGGKDARRKGEAKNSWLTGTAAWNFVAISQWILGIKPEFEGLRIEPCIPKAWDGYSISRLYRGATYVIDIKNPDHVSTGVKKIVVDGKEINGIIVPVFGDGKEHKVEVVMG

SEQ ID NO: 28 - protein, 812 aa, Mahella australiensis
MKYGYFDDDNKEYVITTPQTPYPWINYLGMQDFFSLISNTAGGYCFYKDARLRRITRYRYNNVPTDSGGRYFYIYDNGDFWSPGWMPVKRDLDSYECRHGLGYTSITGQRDGIEAKVLFFVPLDFNGEIHRVTLKNIGDREKRITLFSFVEFCLWNAYDDMTNFQRNFNTGEVEIIGSTIYHKTEYRERRNHYSFYSVNADISGFDSDRESFIGLYNGFDAPRAVTAGKSNNSVADGWSPIASHSINVVLQPGQERDFVFVLGYVENPEDEKWESQGIINKKPALAMIERFKTTEQVDKSLNVLKRYWDELLLKYHVDSADPKLDRMVNVWNQYQCMVTFNLSRSASYFESGIGRGIGFRDSNQDILGFVHQVPDTARQRILDLAATQLEDGGAYHQYQPLTKKGNNEIGGNFNDDPLWLILSTAAYMKETGDFSILDEIVPFDNDSSKAADMFEHLKRSFYHVVNNLGPHGLPLIGRADWNDCLNLNCFSTEPDQSFQTTTNKDSKVAESVLIAAMFVFIGKEYAEICRRRGLDEEAHIARHYIDEMKETVMKYGYDGEWFLRAYDDCGNKVGSKENEEGKIFIETQGFCIMAGMGLEDGSAVKALDSVKKYLDTKYGIVLLNPAFTRYYVNLGEISSYPPGYKENAGIFCHNNPWVMIAETVIGRGERAFEYYKKIAPAYVEERSDIHRMEPYVYSQMIAGKDAKRFGEAKNSWLTGTAAWNFVAISQWILGIKPDYDGLVIDPCIPPDWNGYTVKRMFRGVRYTITVENPEHVCKGVKSMTVDGYPVEGNVLPVFADDGEHEVRVILGC

SEQ ID NO: 29 - protein, 811 aa, Clostridium papyrosolvens
MKYGFFDDSNREYVITTPKTPYPWINYLGTQDFFSLISNTAGGYCFYKDARLRRITRYRYNNVPIDVGGRYFYINDNGSLWSPGWSPVKAELDSYECRHGLGYTKITGSKDGISTEVLYFVPLKFNGEIHRVRVKNTTSDNKSVKLFSCIEFCLWNAYDDMTNYQRNLSTGEVEVENSVIYHKTEYKERRNHFSFYSVNAELTGFDTDRDQFVGLYNGFDAPQVPVSGEPKNTMADGWGPMASHCITVELKAGEEKEFDFILGYVENDVNDKWESKGVINKKSAYKMIEEKGNPAGVQAAFEELQNYWSQLFTQYKLEHKDDKLSRMVNIWNQYQCMVTFNMSRSASYFETGIGRGMGFRDSNQDILGFVHQIPDRARERILDIAATQLENGGAYHQYQPLTKKGNNEIGGNFNDDPVWLIASVAAYIKETGDMDILKENVPFDNDDNKTASLFEHLRRSFYHVVNNLGPHGLPLIGRADWNDCLNLNCFSETPDESFQTTTSKEGKVAESVLIAGMFVYYGPEYVKLCKLNGLEEEAAKAQTEIDKMIKTVKEYGWDGEWFIRAYDDNGDKIGSNENEEGKIFIESQGFCSMAEIGIEDGYVEKALDSARTYLDTPYGLVLQNPAFTKYYVNMGEISTYPAGYKENAGIFCHNNPWVIAGETAIGRGDRAFEYYSKIAPAYTEEISEIHKTEPYVYSQMIAGKDAKRPGEAKNSWLTGTAAWNFVVISQNILGIKPDYLGLMVDPCIPTSWEGYKITRKFRNAIFEITISNPEHVSKGVKKLVVDGKEIDGNIIPVFNDGKTHQVEVVMG

SEQ ID NO: 30 - protein, 811 aa, Clostridium cellulolyticum
MKYGFFDDTNREYVITTPKTPYPWINYLGTQEFFSLISNTAGGYCFYKDARLRRITRYRYNNVPIDMGGRYFYINDNGVLWSPGWSPVKADLDKYECRHGLGYTKITGSKNGISTEVLYFVPLNFNGEIHRVRVKNTTSDNKSVKLFSCIEFCLWNAYDDMTNYQRNLSTGEVEVENSVIYHKTEYKERRNHFSFYSVNADLTGFDTDRDEFIGLYNGFDAPQVPVSGEPKNTIAHGWSPMASHCITVDLKAGEEKELDFILGYVENDVNEKWESKGVINKKKAYKMIEEKGNPAGVQTAFDELQNYWSQLFTQYKLEHKDEKLSRMVNIWNQYQCMVTFNMSRSASYFETGIGRGMGFRDSNQDILGFVHQIPDRARERILDIAATQLENGGAYHQYQPLTKKGNNEIGGNFNDDPVWLIASVAAYIKETGDMDILKENVPFDNDDTKAASLFEHLRRSFYHVVNNLGPHGLPLIGRADWNDCLNLNCFSETPDESFQTTTSKDGKVAESVLIAGMFVYYGPEYVKLCELNGLEDEAAKAQVEIDKMIKTVKEYGWDGEWFIRAYDDNSEKIGSNENEEGKIFIESQGFCSMAEIGLEDGYVEKALDSARKYLDTPYGLVLQNPAFTKYYVNMGEISTYPAGYKENAGIFCHNNPWIIAGETVLGRGDRAFEYYSKIAPAYTEEISDIHKTEPYVYSQMIAGKDAKRPGEAKNSWLTGTAAWNFVVISQNILGIKPDYSGLKIDPCIPASWDGYKITRKFRNAVFEIVISNPEHVSKGVKKVVVDGKEIGGNIIPIFNDEKTHQVEVIMG

SEQ ID NO: 31 - protein, 813 aa, Thermotoga neapolitana
MKFGYFDDKNREYVIVTPRTPYPWINYLGTEDFFSIISHMAGGYCFYKDARLRRITRFRYNNVPTDAGGRYFYIREEDGDFWSPTWMPVRRDLSFFEARHGLGYTKIAGERNGLRATITFFVPRHFTGEVHHLVLQNRTERPRRIKLFSFIEFCLWNALDDMTNFQRNYSTGEVEIEGSVIYHKTEYRERRNHYAFYSVNHSIDGFDTDRESFMGLYNGFEAPQAVVEGNPRNSVASGWAPIASHYLELEIPPLGEKELIFILGYVENPEEEKWERPGVINKKRAKEMIERFKTGEDVERALKELKEYWDELLGRIQVETHDEKLNRMVNIWNQYQCMVTFNIARSASYFESGISRGIGFRDSNQDILGFVHMIPEKARQRILDLASIQFEDGSTYHQFQPLTKKGNNEIGGGFNDDPLWLILSTSAYIKETGDWSILNEEVPFDNDPDKKATLFEHLKRSFYFTVNNLGPHGLPLIGRADWNDCLNLNCFSKNPDESFQTTVNALDGRVAESVFIAGLFVLAGKEFVEICRRLGLEDEAKEAEKHVKKMIETTLEYGWDGEWFLRAYDAFGRKVGSKECEEGKIFIEPQGMCVMAGIGVENGYAKKALDSVKEHLDTPYGLVLQQPAYSRYYIELGEISSYPPGYKENAGIFCHNNPWVAIAETVIGRGDRAFEIYRKITPAYLEDISEIHRTEPYVYAQMVAGKDAPRHGEAKNSWLTGTAAWSFVAITQYILGVRPTYDGLMVDPCIPEDWDGFKITRRFRGATYEITVKNPHHVSKGVKEIIVDGKKIEGQVLPVFNDGKVHRVEVLMG

SEQ ID NO: 32 - protein, 813 aa, Thermotoga maritima
MRFGYFDDVNREYVITTPQTPYPWINYLGTEDFFSIISHMAGGYCFYKDARLRRITRFRYNNVPTDAGGRYFYIREENGDFWTPTWMPVRKDLSFFEARHGLGYTKITGERNGLRATITYFVPRHFTGEVHYLVLENKAEKPRKIKLFSFIEFCLWNALDDMTNFQRNYSTGEVEIEGSVIYHKTEYRERRNHYAFYSVNQPIDGFDTDRESFIGLYSGFEAPQAVVEGKPRNSVASGWAPIASHYLEIELAPSEKKELIFILGYVENPEEEKWEKPGVINKKRAKEMIEKFKTGEDVEHALKELREYWDDLLGRIQVETHDEKLNRMVNIWNQYQCMVTFNISRSASYFESGISRGIGFRDSNQDILGFVHMIPEKARQRILDLASIQFEDGSTYHQFQPLTKKGNNEIGGGFNDDPLWLILSTSAYIKETGDWSILGEEVPFDNDPNKKASLFEHLKRSFYFTVNNLGPHGLPLIGRADWNDCLNLNCFSKNPDESFQTTVNALDGRVAESVFIAGLFVLAGKEFVEICKRRGLEEEAREAEKHVNKMIETTLKYGWDGEWFLRAYDAFGRKVGSKECEEGKIFIEPQGMCVMAGIGVDNGYAEKALDSVKKYLDTPYGLVLQQPAYSRYYIELGEISSYPPGYKENAGIFCHNNPWVAIAETVIGRGDRAFEIYRKITPAYLEDISEIHRTEPYVYAQMVAGKDAPRHGEAKNSWLTGTAAWSFVAITQHILGIRPTYDSLVVDPCIPKEWEGFRITRKFRGSIYDITVKNPSHVSKGVKEIIVDGKKIEGQVLPVFEDGKVHRVEVVMG

SEQ ID NO: 33 - protein, 813 aa, Thermotoga petrophila
MRFGYFDDVNREYVITTPQTPYPWINYLGTEDFFSIISHMAGGYCFYKDARLRRITRFRYNNVPTDAGGRYFYIREENGDFWTPTWMPVRKDLSFFEARHGLGYTKITGERNGLRATITYFVPRHFTGEVHHLVLENRTNTPRRIKLFSFIEFCLWNALDDMTNFQRNYSTGEVEIEGSVIYHKTEYRERRNHYAFYSVNQPIDGFDTDRESFIGLYSGFEAPQAVVEGKPRNSVASGWAPIASHYLEIELAPSEKKELIFILGYVENPEEEKWEKPGVINKKRAKEMIEKFKTGEDVEHALKELKEYWDDLLGRIQVETHDEKLNRMVNIWNQYQCMVTFNISRSASYFESGISRGIGFRDSNQDILGFVHMIPEKARQRILDLASIQFEDGSTYHQFQPLTKKGNNEIGGGFNDDPLWLILSTSAYIKETGDWSILDEEVPFDNDPNKKASLFEHLKRSFYFTVNNLGPHGLPLIGRADWNDCLNLNCFSKDPDESFQTTVNALDGRVAESVFIAGLFVLAGKEFVEICKRRGLEEEAREAEKHVNKMIETTLKYGWDGEWFLRAYDAFGRKVGSKECEEGKIFIEPQGMCVMASIGVDNGYAEKALDSVKKYLDTPYGLVLQQPAYSRYYIELGEISSYPPGYKENAGIFCHNNPWVAIAETVIGRGDRAFEIYRKITPAYLEDISEIHRTEPYVYAQMVAGKDAPRHGEAKNSWLTGTAAWSFVAITQHILGIRPTYDGLVVDPCIPKEWEGFRITRKFRGSIYDITVKNLSHVSKGVKEIIVDGKKIEGQVLPVFEDGKVHRVEVVMG

SEQ ID NO: 34 - protein, 812 aa, Thermotoga neapolitana
MKFGYFDDKNREYVIVTPRTPYPWINYLGTEDFFSIISHMAGGYCFYKDARLRRITRFRYNNVPTDAGGRYFYIREEDGDFWSPTWMPVRRDLSFFEARHGLGYTKIAGERNGLRATITFFVPRHFTGEVHHLVLQNRTERPRRIKLFSFIEFCLWNALDDMTNFQRNYSTGEVEIEGSVIFHKTEYRERRNHYAFFSVNHSIDGFDTDRESFMGLYNGFEAPQAVVEGNPRNSVASGWAPIASHYLELEIPPLGEKELIFILGYVENPEEEKWERPGVINKKRAKEMIERFKTGEDVERALKELKEYWDELLGRIQVETHDEKLNRVNIWNQYQCMVTFNIARSASYFESGISRGIGFRDSNQDILGFVHMIPEKARQRILDLASIQFEDGSTYHQFQPLTKKGNNEIGGGFNDDPLWLILSTSAYIKETGDWSILNEEVPFDNDPDKKATLFEHLKRSFYFTVNNLGPHGLPLIGRADWNDCLNLNCFSKNPDESFQTTVNALDGRVAESVFIAGLFVLAGKEFVEICRRLGLEDEAKEAEKHVKKMIETTLEYGWDGEWFLRAYDAFGRKVGSKECEEGKIFIEPQGMCVMAGIGVENGYAKKALDSVKEHLDTPYGLVLQQPAYSRYYIELGEISSYPPGYKENAGIFCHNNPWVAIAETVIGRGDRAFEIYRKITPAYLEDISEIHRTEPYVYAQMVAGKDAPRHGEAKNSWLTGTAAWSFVAITQYILGVRPTYDGLMVDPCIPEDWDGFKITRRFRGATYEITVKNPHHVSKGVKEIIVDGKKIEGQVLPVFNDGKVHRVEVLMG

SEQ ID NO: 35 - protein, 813 aa, Thermotoga neapolitana
MKFGYFDDKNREYVIVTPRTPYPWINYLGTEDFFSIISHMAGGYCFYKDARLRRITRFRYNNVPTDAGGRYFYIREEDGDFWSPTWMPVRRDLSFFEARHGLGYTKIAGDINGLRATITFFVPRHFTGEVHHLVLQNRTERPRRIKLFSFIEFCLWNALDDMTNFQRNYSTGEVEIEGSVIYHKTEYRERRNHYAFYSVNHSIDGFDTDRESFMGLYNGFEAPQAVVEGNPRNSVASGWAPIASHYLELEIPPLGEKELIFILGYVENPEEEKWERPGVINKKRAKEMIERFKTGEDVERALKELKEYWDELLGRIQVETHDEKLNRMVNIWNQYQCMVTFNIARTSSYFESGISRGIGFRDSNQDILGFVHMIPEKARQRILDLASIQFEDGSTYHQFQPLTKKGNNEIGGGFNDDPLWLILSTSAYIKETGDWSILNEEVPFDNDPDKKATLFEHLKRSFYFTVNNLGPHGLPLIGRADWNDCLNLNCFSKNPDESFQTTVNALDGRVAESVFIAGLFVLAGKEFVEICRRLGLEDEAKEAEKHVKKMIETTLEYGWDGEWFLRAYDAFGRKVGSKECEEGKIFIEPQGMCVMAGIGVENGYAKKALDSVKEHLDTHYGLVLQQPAYSRYYIELGEISSYPPGYKENAGIFCHNNPWVAIAESVIGRGDRAFEIYRKITPAYLEDISEIHRTEPYVYAQMVAGKDAPRHGEAKNSWLTGTAAWSFVAITQYILGVRPTYDGLMVDPCIPEDWDGFKITRRFRGATYEITVKNPHHVSKGVKEIIVDGKKIEGQVLPVFNDGKVHRVEVLMG

SEQ ID NO: 36 - protein, 811 aa, Caldicellulosiruptor obsidiansis
MKFGYFDDAKREYIITTPLTPYPWINYLGMKDFLSLISNHAGGYCFYKDARLRRITRFRYNNVPLDMGGRYFYVKDGDDFWSPSWMPTRKDLEFYQCRHGLGYTIITGRRNGIEVEQSFFVPVDENCEIHHLKITNMTNDKKDIKLFSFIEFCLWNALDDMTNFQRNFSTGEVEIEGSVIYHKTEYRERRNHYSFYSVNTPIAGFDTDRDTFLGLYRGFENPLAVETGKSFNSEAHGWSPIASHMIELSLLPGETTELIFILGYIENEPDKKWFKKGIINKEKAYKMIEKFSKPEDVNAAFEKLKEFWNRLLDKFNVSTGIDKVDRMVNIWNQYQCMVTFNLSRSASYFESGIGRGMGFRDSNQDILGFVHQIPERARERILDLAATQLEDGGAYHQYQPLTKRGNNEIGGNFNDDPLWLILSTVHYIKETGDWSILNEMVPFENNPEKMGTMFEHLKRAFYHVVNNLGPHGLPLIGRADWNDCLNLNAFSTNPDESFQTCDNKDGKTAESVMIAGMFVYVGKEFVKLCEKTGNFELAKDAQNHIDKMKEAILKYGYDGEWFLRAYDYFGNKVGSKECDEGKIFIETQGFCVMAQIGLDDGKAISALDSVKKYLDTEHGIVLVQPAFTEYKIHLGEITSYPPGYKENAAVFCHNNPWIMIAECIVGRGDRAFEYWSKIAPSYREEISEIHKIEPYVYCQMIAGKDAYKPGEAKNSWLTGSAAWNFVAMTQWILGIRPDFDGLLIDPCIPASWEGFKVKRVFRNAIYNIEVKNPNKVSKGVKKVIVDGNEISSNLIPAFSDGKEHFVEVIMG

SEQ ID NO: 37 - protein, 811 aa, Caldicellulosiruptor lactoaceticus
MKFGYFDDAKREYVITTPLTPYPWINYLGMKDFLSLISNHAGGYCFYKDARLRRITRFRYNNVPLDMGGRYFYIKDGDDVWSPSWMPTRKDLEFYECRHGLGYTIITGRRNGIEVEQSFFVPVDENCEIHHLKITNKTNNKKEIKLFSLIEFCLWNALDDMTNFQRNFSTGEVEIEGSVIYHKTEYRERRNHFAFYSVNVPISGFDTDRDTFLGLYRGFENPTAVERGRSFNSEAHGWSPIASHMIEISLLPNETKELVFVLGYVENEPEKKWFKKGVINKEKAYKMIEKFSKPEDVNAAFEKLKEFWDKLLDKFNVSTGIDKVDRIVNIWNQYQCMVTFNLSRSASYFESGIGRGMGFRDSNQDILGFVHQIPERARERILDLAATQLEDGGAYHQYQPLTKRGNNEIGGNFNDDPLWLILSTVHYIKETGDWSILDEVVPFENNPEKVGTLFEHLKRAFYHVVNNLGPHGLPLIGRADWNDCLNLNAFSTNPDESFQTCDNKDGKTAESVMIAGMFVYVGKEFVKLCEKTGNFELAKDAQKHIDNMKEAILKYGYDGEWFLRAYDYFGNKVGSKENDEGKIFIETQGFCVMAQIGLDDGKAISALDSVKKYLDTEHGIVLVQPAFTEYKIHLGEITSYPPGYKENAAVFCHNNPWIMIAECIVGRGDRAFEYWSKIAPSYREEISDVHKIEPYVYCQMIAGKDAYKPGEAKNSWLTGSAAWNFVAMTQWILGIRPDFDGLLIDPCIPTSWEGFKVKRVFRNAIYHIEVKNPNRVSKGVKKVIVDGKEMSSNLIPAFSDGKEHFVEVIMG

SEQ ID NO: 38 - protein, 811 aa, Caldicellulosiruptor kristjanssonii
MKFGYFDDAKREYVITTPLTPYPWINYLGMKDFLSLISNHAGGYCFYKDARLRRITRFRYNNVPLDMGGRYFYIKDGDDVWSPSWMPTRKDLEFYECRHGLGYTIITGRRNGIEVEQRFFVPVDENCEIHHLKITNKTNNKKEIKLFSLIEFCLWNALDDMTNFQRNFSTGEVEIEGSVIYHKTEYRERRNHFAFYSVNVPISGFDTDRDTFLGLYRGFENPAAVERGRSFNSEAHGWSPIASHMIEISLLPNETKELVFVLGYVENEPEKKWFKKGVINKEKAYKMIEKFSKPEDVNAAFEKLKEFWDKLLDKFNVSTGIDKVDRIVNIWNQYQCMVTFNLSRSASYFESGIGRGMGFRDSNQDILGFVHQIPERARERILDLAATQLEDGGAYHQYQPLTKRGNNEIGGNFNDDPLWLILSTVHYIKETGDWSILDEVVPFENNPEKMGTLFEHLKRAFYHVVNNLGPHGLPLIGRADWNDCLNLNAFSTNPDESFQTCDNKDGKTAESVMIAGMFVYVGKEFVKLCEKIGNFELAKDAQKHIDNMKEAILKYGYDGEWFLRAYDYFGNKVGSKENDEGKIFIETQGFCVMAQIGLDDGKAISALDSVKKYLDTEHGIVLVQPAFTEYKIHLGEITSYPPGYKENAAVFCHNNPWIMIAECIVGRGDRAFEYWSKIAPSYREEISDVHKIEPYVYCQMIAGKDAYKPGEAKNSWLTGSAAWNFVAMTQWILGIRPDFDGLLIDPCIPTSWEGFKVKRVFRNAIYHIEVKNPNRVSKGVKKVIVDGKEMSSNLIPAFSDGKEHFVEVIMG

SEQ ID NO: 39 - protein, 811 aa, Caldicellulosiruptor owensensis
MKFGYFDDSKREYIITTPLTPYPWINYLGMQDFLSLISNHAGGYCFYKDARLRRITRFRYNNVPLDMGGRYFYIKDGDDFWSPSWMPTRKDLEFYQCRHGLGYTIITGRRNGIEVEQKFFVPVNENCEIHHLKITNMTNNKKDIKLFSFIEFCLWNALDDMTNFQRNFSTGEVEIEGSVIYHKTEYRERRNHYSFYSVNTPIAGFDTDRDTFLGLYRGFENPVAVEMGKSFNSEAHGWSPIASHMIELSLLPGETTELIFILGYIENEPDKKWLKKGIINKEKAYKMIEKFSKPEDVNAAFEKLKEFWNRLLDKFNVSTGIDKVDRMVNIWNQYQCMVTFNLSRSASYFESGIGRGMGFRDSNQDILGFVHQIPERARERILDLAATQLEDGGAYHQYQPLTKRGNNEIGGNFNDDPLWLILSTVHYIKETGDWTILNEMVPFENNPEKVGTMFEHLKRAFYHVVNNLGPHGLPLIGRADWNDCLNLNAFSTNPDESFQTCDNKDGKTAESVMIAGMFVYVGKEFVKLCEKTGNFELAKDAQKHIDNMKEAILNYGYDGEWFLRAYDYFGNKVGSKECDEGKIFIETQGFCVMAGIGLDDGKAISALDSVKKYLDTEHGIVLVQPAFTEYKIHLGEITSYPPGYKENAAVFCHNNPWIMIAECIVGRGDRAFEYWSKIAPSYREEISDVHKIEPYVYCQMIAGKDAYKPGEAKNSWLTGSAAWNFVAMTQWILGIRPDFDGLLIDPCIPASWEGFKVKRVFRNSVYNIEVKNPNKVSKGVKKVIVDGNEMPSNLIPAFSDGKEHFVQVIMG

SEQ ID NO: 40 - protein, 811 aa, Caldicellulosiruptor bescii
MKFGYFDDAKREYVITTPLTPYPWINYLGMKDFLSLISNHAGGYCFYKDARLRRITRFRYNNVPLDMGGRYFYIKDGDDVWSPSWMPTRKDLEFYQCRHGLGYTIITGRRNGIEVEQRFFVPVDENCEIHHLRITNKTNTKKEIKLFSLIEFCLWNALDDMTNFQRNFSTGEVEIEGSVIYHKTEYRERRNHFSFYSVNVPISGFDTDRDTFLGLYRGFENPAAVELGKSFNSEAHGWSPIASHMIEISLLPEETKELVFVLGYVENEPEKKWFKKGVINKEKAYKMIEKFSKPEDVNAAFEKLKEFWDGLLDKFNVSTGIDKVDRMVNIWNQYQCMVTFNLSRSASYFESGIGRGMGFRDSNQDILGFVHQIPERARERILDLAATQLEDGGAYHQYQPLTKRGNNEIGGNFNDDPLWLILSTVHYIKETGDWSILDEVVPFENNPEKVGTLFEHLKRAFYHVVNNLGPHGLPLIGRADWNDCLNLNAFSTNPDESFQTCDNKDGKTAESVMIAGMFVYVGKEFVKICERLGKEDIAKDAQYHIEKMKEAILNYGYDGEWFLRAYDYFGNKVGSKENDEGKIFIETQGFCVMAQIGLDDGKAISALDSVKKYLDTEHGIVLVQPAFTEYKIHLGEITSYPPGYKENAAVFCHNNPWIMIAECIVGRGDRAFEYWSKIAPSYREDISEIHKLEPYVYCQMIAGKDAYKPGEAKNSWLTGSAAWNFVAMTQWILGIRPDFDGLLIDPCIPKEWNGFTVKRVFRNAVYNIKVKNPDGVSKGIKKVVVDGKEMSSNLIPAFSDGKEHFVEVIMG

SEQ ID NO: 41 - protein, 831 aa, Clostridium phytofermentans
MKFGFFDDLNKEYVITTPETPYPWINYLGSQAFFSLISNTAGGYSFYKDAKLRRITRFRYNNVPLDLGGGRYYYLYDNGDFWSPGFAPAKKELEYYECRHGMGYTKITGRRNGIETKITFFVPLDYNGEVHKVSIVNTSNQVKNVKLFSFLEWCLWNAQEDSTNFQRNFSTGEVEVKGSVIYHKTEYKERRDHYAFFSVNAPISGFDSDRESFLGTYHGFDNPQVVARGESNNSVADGWSPIASHCVEISLQPKESKELVFILGYAENKLEEKWEYQVGEVDTDGLLLSSVAPNGTNVINKKKAEEMIAKYATVKAVDQALLELKDYWDKLLSKYNVKSHDDKLNRMVNIWNQYQCMVTFNLSRSASYFESGIGRGMGFRDSNQDLLGFVHQIPDRARERIIDLASTQLPDGGAYHQYQPLTKKGNDEIGGNFNDDPLWLILAVTAYIKETGDYDILEVNTPYDNKLELAKPLSDHLKRAFNHVIENLGPHGLPLIGRADWNDCLNLNCFSMDPGESFQTVTSKDGKVAESVMIAGMFTYIGEEYAILMDKVGNNEESIRAMKEVENMRDVIMKHGYDGSWFLRAYDDFGRKIGSDECEEGKIFIESQGFCVMGKCGLNDGKAQKALDSVEKRLGTKFGLVLNNPAFTRYYVEYGEISTYPAGYKENAGIFCHNNAWIMCAEAVIGRGDKAFDYYTKIAPAYTEEYSEIHRLEPYVYAQMVAGKDARRFGEAKNSWLTGTASWNFVAISQYILGIKPEYDGLMIDPAIPTDWEVYQITREFRGDRYDITIVNPYHVSKGVKKLVVDAKEVEGNIIPVFGDGLEHKVKVILG

SEQ ID NO: 42 - protein, 811 aa, Caldicellulosiruptor kronotskyensis
MKFGYFDDAKREYLITTPLTPYPWINYLGMKDFLSLISNHAGGYCFYKDARLRRITRFRYNNVPLDMGGRYFYIKDGDDVWSPSWMPTRKDLEFYQCRHGLGYTIITGRRNGIEVEQRFFVPVDENCEIHHLRITNKTNTKKEIKLFSLIEFCLWNALDDMTNFQRNFSTGEVEIEGSVIYHKTEYRERRNHFSFYSVNVPISGFDTDRDTFLGLYRGFENPAAVELGKSFNSEAHGWSPIASHMIEISLLPEETKELVFVLGYVENEPEKKWFKKGVINKEKAYKMIEKFSKPEDVNAAFEKLKEFWDGLLDKFNVSTGIDKVDRMVNIWNQYQCMVTFNLSRSASYFESGIGRGMGFRDSNQDILGFVHQIPERARERILDLAATQLEDGGAYHQYQPLTKRGNNEIGGNFNDDPLWLILSTVHYIKETGDWSILDEVVPFENNPEKVGTLFEHLKRAFYHVVNNLGPHGLPLIGRADWNDCLNLNAFSTNPDESFQTCDNKDGKTAESVMIAGMFVYVGKEFVRLCEKTGNFELAKDAQKHIDNMKEAILKYGYDGEWFLRAYDYFGNKVGSKENDEGKIFIETQGFCVMAGIGLDDGKAISALDSVKKYLDTEHGIVLVQPAFTEYKIHLGEITSYPPGYKENAAVFCHNNPWIMIAECIVGRGDRAFEYWSKIAPSYREDISEIHKLEPYVYCQMIAGKDAYKPGEAKNSWLTGSAAWNFVAMTQWILGIRPDFDGLLIDPCIPKEWNGFTVKRVFRNAVYNIKVKNPDGVSKGIKKVVVDGKEMSSNLIPAFSDGKEHFVEVIMG

SEQ ID NO: 43 - protein, 810 aa, Clostridium cellulovorans
MKFGFFDDANREYVINTPKTPYPWINYLGSEEFFGIISNTSGGYCFYKDAKLRRLTRYRYNNVPIDNGGRYFYVNDGGDVWSHTWKPVKKELSAYECRHGLGYSKFTGERNGVKVSQLSFVPLGMNAEVHQIKVKNTSDTDKAVKLFSFIEFCLWDAGADGENFQRNFSTGEVEIQGSVIYHKTEYRERRNHYSFYSVNTEIAGFDTDRDSFIGLYNGFEAPDVVMAGESKNSVASGWAPVASHGINVELKAGEEKSYVFVLGYVENKDEEKWESKGVINKTKAKEMIEALADDAAVEKALAELKKYWDGLLSNYTLNSDDEKLNRMVNIWNPYQCMITFNMSRSASYFESGIGRGMGFRDSNQDLLGFVHQIPERARERIIDIASTQFEDGGCYHQYQPLTKKGNNDIGSGFNDDPLWLILGVTAYIKESGDMGILDEIVPFDNDLNNTATLMGHLKVSFDHVINNRGPHGLPLIGRADWNDCLNLNCFSATPGESFQTTENKEGGVAESVLIAGMFVFIGKEYVALCKEIGDLEEAARAQKHIDEMTEAVLTHGYDGEWFLRAYDFYGNKIGSNENEEGKIFIESQGFCVMGGIGVENGLAEKAMNSVIERLDTKYGIVLNNPAFTKYHLEMGEITSYPEGYKENAGIFCHNNPWIACAETVIGRGDRAFEVYRKIAPAYLEEISDIHKTEPYVYSQMVAGKDAVRFGEAKNSWLTGTAAWNFITISQWILGIKPDYQGLRIDPCIPKDWEGYSISRKFKGAQYDIVIKNPNKVCKGVASITVDGKAIEGNIVPTFEGGVHSVEVVMG

SEQ ID NO: 44 - protein, 811 aa, Caldicellulosiruptor hydrothermalis
MKFGYFDDAKREYVITTPLTPYPWINYLGMKDFLSLISNHAGGYCFYKDARLRRITRFRYNNVPLDMGGRYFYIKDNEDFWSPSWMPTRKDLEFYECRHGLGYTIITGRRNGVEVEQTFFVPVDENCEIHYLKITNKSTQPKDLTLFSLIEFCLWNALDDMTNFQRNLSTGEVEIEGSVIYHKTEYRERRNHYSFYSVNVPIDGFDTDRDTFLGLYRGFDAPVAVENGQSFNSEAHGWSPIASHMIKISLQPGETKELVFVLGYVENDEDKKWLKKGVINKEKAYKMIEKFKNPEDVQRSFENLRLFWSNLVNKFNVLTGIDKVDRMVNIWNQYQCMVTFNLSRSASYFESGIGRGMGFRDSNQDILGFVHQIPERARERILDLAATQLEDGGAYHQYQPLTKRGNNEIGSNFNDDPLWLILSTAHYIKETGDWSILDEIVPFENDPQKAASMFEHLRRAFYHVVNNLGPHGLPLIGRADWNDCLNLNAFSTNPDESFQTCDNKDGKTAESVMIAGMFVYVGKEFVKICERLGKEDIAKDAQYHIEKMKEAILNYGYDGEWFLRAYDYFGNKVGSKENDEGKIFIETQGFCVMAGIGLDDGKAISALDSVKKYLDTEHGIVLVQPAFTEYKIHLGEITSYPPGYKENAAVFCHNNPWIIIAECIVGRGDRAFEYWAKIAPSYREEISDVHKLEPYVYCQMIAGKDAYKPGEAKNSWLTGSAAWNFVAMTQWILGIRPDFDGLLIDPCIPREWKGFTVKRVFRNAVYNIQVKNPDGVSKGVKKVVVDGKELSGNLIPAFSDGKEHFVEVTMG

SEQ ID NO: 45 - protein, 811 aa, Caldicellulosiruptor saccharolyticus
MKFGYFDDNKREYVITTPLTPFPWINYLGMKDFLSLISNHAGGYCFYKDARLRRITRFRYNNVPLDMGGRYFYIKDNEDFWSPSWMPTRKVLEFYECRHGLGYTIITGRRNGVEVEQTFFVPVDENCEIHYLKITNKSTQPKDLTLFSLIEFCLWNALDDMTNFQRNLSTGEVEIEGSVIYHKTEYRERRNHYSFYSVNVPIDGFDTDRDTFLGLYRGFDAPLAVENGKSFNSEAHGWAPIASHMIKISLQPGEAKELVFVLGYVENDEDKKWLKKGVINKEKAYKMIEKFKNPEDVQRSFENLRLFWSNLLNKFNVLTGIDKVDRMVNIWNQYQCMVTFNLSRSASYFESGIGRGMGFRDSNQDILGFVHQIPERARERILDLAATQLEDGGAYHQYQPLTKRGNNEIGSNFNDDPLWLILSTAHYIKETGDWSILDEIVPFENDPQKAASMFEHLRRAFYHVVNNLGPHGLPLIGRADWNDCLNLNAFSTNPDESFQTCDNKDGKTAESVMIAGMFVYVGKEFVKICERLGKEDIAKDAQYHIEKMKEAILNYGYDGEWFLRAYDYFGNKVGSKENDEGKIFIETQGFCVMAGIGLDDGKAISALDSVKKYLDTEHGIVLVQPAFTEYKIHLGEITSYPPGYKENAAVFCHNNPWIMIAECIVGRGDRAFEYWSKIAPSYREEISDVHKLEPYVYCQMIAGKDAYKPGEAKNSWLTGSAAWNFVAMTQWILGIRPDYDGLLIDPCIPREWKGFTVKRVFRNAIYNIQVKNPDAVSKGVKKVVVDGKEMPSNLIPAFSDGKEHFVEVILG

SEQ ID NO: 46 - protein, 811 aa, Clostridium stercorarium
MKFGYFDDVNREYVITTPATPYPWINYLGCQDFFSLISNTSGGYCFYRDARLRRITRYRYNNVPIDSGGRYFYIYDSGDYWTPGWMPVKRELDRYECRHGLGYTRITGERNGVEVSQLAFVPLNYNGEVNQVVITNKSGSEKEIALFSFVEFCLWNAMDDMTNFQRNFSTGEVEVEGSAIYHKTEYRERRNHYAFFWVNSPIDGFDTDRESFLGLYNGFDSPKNVAAGKPTNSIASGWSPIASHYIKMSLKPGEKRSYIFVLGYVENPPEEKWERKGVINKKRAREMQQKFIDDTCVEKAFQELKDYWADLCSKFALESHDEKLNRMVNIWNPYQCMVTFNMSRSASYFESGISRGMGFRDSAQDLLGFVHQVPERARQRILDLASTQFEDGSAYHQYQPLTKKGNSDIGSGFNDDPLWLILATAQYIKETGDFGILDEMVPFDCDENKKDTLFEHLKRSFYHVVNNLGPHGLPLIGRADWNDCLNLNCFSTQPMNPFTPADKFEGRVAESVFIAGMFVLIGPEYVELCKRRGLSEEAAEAEKHIQNMVNAVLTHGYDGEWFLRAYDHFGNKIGSKECSEGQIFIEPQGICVMAGIGVKEGLAQKALDSVMKRLDTKYGIVLHTPAYTEYYLNLGEISSYPPGYKENAGIFCHNNPWIAIAETVIGRGDRAFEVYSKIAPAYIEDISDIHRTEPYVYSQMIAGRTRWSFGEAKNSWLTGTAAWNFVAITQYILGVRPVYDGLMVDPCIPASWDGFTVTREFRGSKYRIRVENPEHICKGVNKVIMDGKEIEGQVLPVSPKESEHEVIVIMG

SEQ ID NO: 47 - protein, 833 aa, Eubacterium siraeum
MKFGYFDDKNREYVITSPKTPYPWINYLGTQGFFSLISNTAGGYCFYKDARLRRITRYRYNNVPVDMGGRYFYINDGGHVWNPGWSPVKTTLDSYECRHGMGYTIIKGSSNGVTATVTFFVPQNFNGEIQKVTIKNDSDKEKNLKLFSFLEWCLWDANDDTTNFQRNFNTGEVEIDGSVIYHKTEYKERRDHYAFYSVNADINGYDTDRESFLGLYNGFDAPQTVFAGAPNMSVADGWSPVASHYIEIKLQPGESKDLVFCLGYVENKFEEKFAPDLDENSTIITSGDRKKNIVNKAKAQAMMAMCDTAEKADKLLAELKEHWNSLLGQYSVDSPDEKLNRMVNIWNQYQCMVTFNMSRSASYFESGIGRGMGFRDSNQDLLGFVHQIPARARERLIDLAATMLEDGGAYHQYQPLTKMGNHELGSNFNDDPLWMILAVAAYIKETGDVSILDEKVPYENRDELADTMLDHMKRAFYHVVKKVGPHGLPLSGRADWNDCLNLSCFSDKPGESFQTYNNKEMFKEPPYYSKVAESVMIAGMFCAIAPEYVEMCKLKGDTSEAEKAQAEIEKMRKNTLEYGYDGEWFLRAYDHYGKKVGSHECEEGKIFIEPQGWCVLAGLGKDKGYDIQTLDSVDKYLNSKHGLVLNNPAFTHYYIQYGEISTYPGGYKENAGIFCHNNAWIICAEAAVGRGDKAFEYYSKIAPAFREDISDLHRTEPYVYAQMIAGKDAKRHGEAKNSWLTGTAAWNFVAVSQYILGIKPEYNGLKIDPSIPHEWDGFTASRLFRGATYEITVKNPDHVCHGVKSVTVDGKAVDSNVIPVFENGTHKVEVVLG

SEQ ID NO: 48 - protein, 833 aa, Eubacterium siraeum
MKFGYFDDKNREYVITSPKTPYPWINYLGTQGFFSLISNTAGGYCFYKDARLRRITRYRYNNVPVDMGGRYFYINDGGHVWNPGWSPVKTTLDSYECRHGMGYTIIKGSSNGVTATVTFFVPQNFNGEIQKVTIKNDSDKEKNLKLFSFLEWCLWDANDDTTNFQRNFNTGEVEIDGSVIYHKTEYKERRDHYAFYSVNADINGYDTDRESFLGLYNGFDAPQTVFAGAPNMSVADGWSPVASHYIEIKLQPGESKDLVFCLGYVENKVEEKFAPDLDENSTIITSGDRKKNIVNKAKAQAMMAMCDTAEKADKLLAELKEHWNSLLGQYSVDSPDEKLNRMVNIWNQYQCMVTFNMSRSASYFESGIGRGMGFRDSNQDLLGFVHQIPARARERLIDLAATMLEDGGAYHQYQPLTKMGNHELGSNFNDDPLWMILAVAAYIKETGDVSILDEKVPYENRDELADTMLDHMKRAFYHVVKKVGPHGLPLSGRADWNDCLNLSCFSDKPGESFQTYNNKEMFKEPPYYSKVAESVMIAGMFCAIAPEYVEMCKLKGDTAEAEKAQAEIEKMRKNTLEYGYDGEWFLRAYDHYGKKVGSHECEEGKIFIEPQGWCVLAGLGKDKGYDIHTLDSVDKYLNSKHGLVLNNPAFTHYYIQYGEISTYPGGYKENAGIFCHNNAWIICAEAAVGRGDKAFEYYSKIAPAFREDISDLHRTEPYVYAQMIAGKDAKRHGEAKNSWLTGTAAWNFVAVSQYILGIKPEYNGLKIDPSIPHEWDGFTASRLFRGATYEITVKNPDHVCHGVKSVTVDGKAVDSNVIPVFGNGTHKVEVVLG

SEQ ID NO: 49 - protein, 811 aa, Clostridium lentocellum
MKYGHFDDARREYVITTPQTPYPWINYLGNEAFFGLISNTSGGYSFYKDAKLRRITRFRYNSVPIDNGGRYFYINDNGDVWSHTWKPVKKELDFYECRHGLGYSIFTGERNGIRVEQLAFVPNGENAEIHRLKIKNTSDAKKDFKLFSFIEWCLWDAQDDTTNFQRNFSTGEVEIVGSTIYHKTEYKERRNHYAFYSVNVPVDGYDTDRDSFVGLYNGFEAPDSVMNGECKNSVASGWSPVAAHQINVELAPGEEKVFVFTLGYIENPQDEKWESKGIINKKPAEALMSRFATDEAVEAAFAALKGSWDKLLSHYTLQSDDEKLNRMVNIWNPYQCMVTFNMSRSASYFESGIGRGMGFRDSNQDLLGFVHQIPERARERIIDIASTQFEDGGCYHQYQPLTKKGNNDIGSGFNDDPLWLILGTTAYIKESGDLDILKEMVPFDNDENNKATLFDHLRVSLDHVTNNLGPHGLPLIGRADWNDCLNLNCFSNTPGESFQTTENQEGGVAESVFIAGMYVMIGKEYVALCKEIGNEAEAARATAEVEKMEKNILAHGYDGEWFLRAYDFYGNKIGSNENEEGKIFIESQGFCVMAGVGAETGEAEKALNSVKERLDTEYGIVLNNPAFTTYHIEMGEISTYPAGYKENAGIFCHNNPWIACAETVIGRGDRAFEVYKKIAPAYLEEKSDIHKTEPYVYSQMVAGKDAVRHGEAKNSWLTGTAAWNFITISQWILGIKPDYKGLKVDPCIPKAWDGYKIMREFKGANYEISIQNPNHVSKGVKSLVVDGEVINGNIIPDFKDGKTHQVEVVLG

SEQ ID NO: 50 - protein, 833 aa, Eubacterium siraeum
MKFGYFDDKNREYVITSPKTPYPWINYLGTQGFFSLISNTAGGYCFYKDARLRRITRYRYNNVPIDMGGRYFYINDGGHVWNPGWSPVKTTLDSYECRHGMGYTIIKGSSNGVTATVTFFVPQNFNGEIQKVTIKNDSDKEKNLKLFSFLEWCLWDANDDTTNFQRNFNTGEVEIDGSVIYHKTEYKERRDHYAFYSVNAPINGYDTDRESFLGLYNGFDAPQTVFAGAPNMSVADGWSPVASHYIEIKLQPGESKDLVFCLGYVENKFEEKFAPDLDENSTIITSGDRKKNIVNKAKAKAMMAMCDTAEKADKLLAELKEHWNSLLGQYSVNSPDEKLNRMVNIWNQYQCMVTFNMSRSASYFESGIGRGMGFRDSNQDLLGFVHQIPARARERLIDLAATMLEDGGAYHQYQPLTKMGNHELGSNFNDDPLWMILAVAAYIKETGDVSILDEKVPYENRDELADTMLDHMKRAFYHVVKKVGPHGLPLSGRADWNDCLNLSCFSDKPGESFQTYNNKEMFKEPPYYSKVAESVMIAGMFCAIAPEYVEMCKMKGDIAEAEKAQAEIEKMRKNTLEYGYDGEWFLRAYDHYGKKVGSHECEEGKIFIEPQGWCVLAGLGKDKGYDIQTLDSVDKYLNSKHGLVLNNPAFTHYYIQYGEISTYPGGYKENAGIFCHNNAWIICAEAAVGRGDKAFEYYSKIAPAFREDISDLHRTEPYVYAQMIAGKDAKRHGEAKNSWLTGTAAWNFVAVSQYILGIKPEYNGLKIDPSIPHEWDGFTASRLFRGATYEITVKNPDHVCHGVKSVTVDGKAVDSNVIPVFENGTHKVEVVLG

SEQ ID NO: 51 - protein, 811 aa, Saccharophagus degradans; identical to SEQ ID NO: 12

SEQ ID NO: 52 - protein, 811 aa, Dictyoglomus turgidum
MRFGYFDDKNREYVITDPKTPFPWINYLGVDNFFSLISNTGGGYCFYKDARLRRILRFRYNNVPIDNGGRYFYIWENGDFWSPTWKPVRKDLDKYECRHGLSYTRILGERNGISAQVLYFVPLKENCEIHYLKLKNNTNLKRSLKLFSFVEWCLWNAWDDQTNFQRNLSTGEVEIEGSVIYHKTEYRERRNHYAFYSVNVPIQGFDTDRDIFIGMYNGFEAPRAVVEGKSYNSVAEGWSPIASHYIEIELEPGEVKDFVFILGYVENPEEEKWERPGVINKKRAYEIINKFKTSEDVEKAFWELRNYWNDILSKYQVNHNDEILSRMVNIWNQYQCMITFNLARSASYFESGISRGIGFRDSNQDILGAVHMIPERVRERILDLASTMFEDGSCYHQYQPLTKRGNNEIGSGFNDDPLWIILSTGAYIKETGDFSILREVIPYNNDETKKGTLFEHIKRAYHHVTDNLGPHGLPLIGRADWNDCLNLNCFSKNPDESFQTTSNVEGGTAESVFIAGLFVYATPDYIRMCEEMGEKEEAEWAKKAAQDMINAINNYGWDGEWFLRAYDYFGRKVGSKECEEGKIFIEPQGICTMAGIGKDDGRAKLALDSCIKYLDTKYGMVLQQPAYSKYYLELGEISSYPPGYKENAGIFCHNNPWVGIGETMIGRGWRAFDVYRKITPAYFEDESEIHKMEPYVYCQMVAGKDAKRHGEGKNSWLTGTASWAFVLISQYILGVRPDYDGLRVDPCIPEDWKEFRVVRRYRGSVYDVKVINPEGKSKGVKRIVVDGKEISGNLLPVFNDGKIHEVVVEMG

SEQ ID NO: 53 - protein, 811 aa, Dictyoglomus thermophilum
MRFGYFDDKNREYVITDPKTPFPWINYLGVDNFFSLISNTGGGYCFYKDARLRRILRFRYNNVPIDNGGRYFYIWENGDFWSPTWKPVKKELDKYECRHGLSYTRILGERNGISAQVLFFVPLKENCEIHYLKLRNNSGVRRSLKLFSFVEWCLWNAWDDQTNFQRNLSTGEVEIEGSVIYHKTEYRERRNHYAFYSVNVPIQGFDTDRDTFIGMYNGFEAPRAVVEGRPYNSVAEGWSPIASHYIEVDLEPGEVKDFVFVLGYVENPEEEKWERPGVINKKRAYEIINKFKTSQDVEKAFWDLRNYWNDILSKYQVNHSDEILARMVNIWNQYQCMITFNVARSASYFESGISRGIGFRDSNQDILGAVHMIPERVRERILDLASTMFEDGSCYHQYQPLTKRGNNEIGSGFNDDPLWIILSTGAYIKETGDYSILREVIPYNNDESKKGTLFEHIKRAYHHVTNNLGPHGLPLIGRADWNDCLNLNCFSKNPDESFQTTSNVEGGTAESVFIAGLFVFATPDYVRMCEEMGEKEEAEWAKKAAEDMINAINNYGWDGEWFLRAYDFFGRKVGSKECEEGKIFIEPQGICTMAGIGKEDGRAKLALDSCIKYLDTKYGMVLQQPAYSKYYLELGEISSYPPGYKENAGIFCHNNPWVGIGETVIGRGWRAFEVYKKITPAYFEDESEIHRMEPYVYCQMVAGKDAKRHGEGKNSWLTGTASWAFVLISQYILGIRPDYDGLRVDPCVPEDWKEFRVVRKYRGSVYDIKVLNPEGRSKGVKRIFVDGKEISGNLLPIFNDGKVHEVVVEMG

SEQ ID NO: 54 - protein, 810 aa, Anaerophaga thermohalophila
MKFGYFDDKNREYVITTPATPWPWINYLGNEDFFSLISNTAGGYSFYKDAKFRRLTRFRYNNVPMDNGGRYFYINDGHDIWSPGWKPVKTRLDGYECRHGLSYTKIIGEKNGLKAEVLFFVPLKSWCEIQKMTITNTSPETKRFKLFSFLEWCLWNAEDDQNNLQRNLNTGEVEIDGSTLYHKTEYRERRNHYAFYHVNTPIQGFDTDRESFAGLYNELSEPQTVLEGKPRNSHAHGWSPVASHYLEIELKPGESKDLVFILGYVENNENEKWEDKNVINKKPAGKLIERFDTAEKVDVAFSELIEYWDHLLDKFVLESGDEKLDRMVNIWNQYQCMVTFNMSRSASYFEVGIGRGMGFRDSNQDLIGFVHQIPERARERIIDIASTQFEDGGAYHQYQPLTKRGNNAIGGNFNDDPLWLILSTTEYIKETGDYGILDEMVPFDNDASVAKPLFEHLKVSFYHVVNNPGPHGLPLIGRADWNDCLNLNCFSNDPDESFQTTENRSGGTAESLMIAGLFVVYGQEFVRLCRKTGKEREADKAQKHVDKMVEAVKRHGWDGEWFLRAYDFFGRKVGSKENEEGQIFIESQGWCSMAGIGLDEGMVEKALDSVKERLDCEYGIVLNNPAFTKYVIEYGEISSYPEGYKENAGIFCHNNPWIMIGETVLGRGERAWEYYRKICPAYLEDISGLHRTEPYVYAQMIAGKDAHKPGEAKNSWLTGTAAWNYYAVTRYILGIRPDYDGLRIDPCIPPSWKGFKIKRKLRGTTFNIKVENPKSVSKGVALLEMDGKAVDGNLIEKFDGGTHEVLVILG

SEQ ID NO: 55 - protein, 811 aa, Paenibacillus polymyxa
MKYGFFDDVNQEYVIHSPQTPYPWINYLGNERFFGIISNTSGGYAFYRDARLRRLTRYRYNNIPVDNGGRYFYIYDDGDYWTPGWMPVKRELEQYECRHGLGYTSIMGERSGIRATQLAFVPLSFDGEVHQVKLQNTSLQTKKIKLFSFVEFCLWNAYDDMTNYQRNLNTGEVEIQDSVIYHKTEYHERRNHYAFFSANRPLAGYDTDREAFLGLYNGLDQPQTVAAGRASNSIASGWSPIGSHCIEITLEPGEETSCNFILGYVENPEEEKWESPGVINKKQAHAMIAQFADEADVERALSELRTYWNNLLSKYTLQSHDDKLNRMVNIWNPYQCMVTFNMSRSASYFESGIGRGMGFRDSNQDLLGFVHQIPERARERIIDIASTQFENGGAYHQYQPLTKKGNHEVGGGFNDDPLWLIVGTAAYIKETGDFAILDEQVPFDGNVERTATLFEHLKRSFYHVVDNLGPHGLPLIGRADWNDCLNLNCFSATPDEPYQTTQNLEGRIAESVFIAGLFVYTGPDFIELCKRRGLDEEAATAQAYVDRMRTATLEHGFDGEWFLRAYDHYGDKIGSKDCEEGQIFIEPQGFCVMAGIGVEEGLAQKALDSTRDRLETSYGIMLINPPYSRYYINLGEISSYPPGYKENAGIFCHNNPWIMMAEAVIGRGDRAFELYSKIAPAYLEDISDIHRTEPYVYAQMIAGKDAVREGEAKNSWLTGTAAWNFIAITQSILGIQPEWDGLRIDPCIPTAWDEFTVTRVFRGDTYVIHITNPQHVSKGVVTVTVDGTVLTNNILPVAGDGAIHQVKVLLG

SEQ ID NO: 56 - protein, 811 aa, Maribacter sp.
MKYGHFDDANKEYVITNPKTPYPWINYLGNEDFFSLTSNTGGGYTFYKDAKFRRLTRYRYNNVPVDNGGKYFYIKDGDTTWSPGWKPLKTPLDSYECRHGMSYTKFNSSKNGLEAQILQFIPLGFWGEIQKVSLKNTASETKKIKLFSFIEWCLWNAEDDMTNFQRNFSTGEVEIEDSTIYHKTEFKERRNHYAFYSSNRPIDGYDTDRESFVGLYNDFDNPDVVNDGTPKNTVAHGWSPIASHYFEIELQPGQQEDLIFMLGYVEVDKDDKWESKGVINKKPAKAMISQFDTVEKVNVAYNALAVYWDKLLGKINIDSGDDRLDRMVNIWNQYQCMVTFNMSRSASFFESGIGRGMGFRDSNQDLIGFVHQIPERARERIFDIASTQFEDGSCYHQYQPLTKKGNSAVGGDFNDDPLWLILSTTEYIKETGDFSLLDEMVPFDNDESKAKPHFDHLKASFYHVVNNLGPHGLPLIGRADWNDCLNLNCFSENPNDSFQTTGNKKGRTAESLMIAGLFVVYGKEYVKLCNRIGNEAEANKAQTHVDQMIEAVKQHGWDGDWYLRAYDYFGKKVGSNDNEEGKIFIESQGWCSMAEIGKEEGMVEKSMNAVKEHLDCEYGVVLNYPAFTKYYIEYGEISTYPAGYKENGGIFCHNNPWIMIGETILGRGDQAYEYYTKIAPSFLEDISELHKVEPYVYCQMIAGKEAHTPGEAKNSWLSGTASWNFFAITQYILGVKTDYDGLVIDPCIPTKWNGFKMTREFRGATYNIEVQNPNHVSKGVKTVLVNGSEIKSNTVPILEAGKEHSVMVIMG

SEQ ID NO: 57 - protein, 812 aa, Teredinibacter turnerae
MKFGHFDDKAKEYVITNPKTPYPWINYLGNEDFFSLISNTAGGYTFYKDAKFRRLTRYRYNNVPVDNGGKYFYINDGGDVWSPGWKPVKADLDNYSCAHGMSYTRITGERNGVEAEVTYFIPLGTWAEVQKVKLKNTSGATKKLKFFSFIEWCLWNAEDDMQNLQRNLSTGEVEVEGSVIYHKTEFKERRNHYAFFSVNAPIQGFDTDRDTWKGTYNDFDRPDAVFEGEPRNSEAHGWSPCASHYLEIELAPGEEKDLTFVLGYIEVDKDNKWESKNVINKNPAKAVIERFDTVEKVDAELKKLSDYWSKLLSTYELTSGDEKLDRMVNIWNQYQCMVTFNMSRSASFFETGIGRGMGFRDSSQDLIGFVHQVPERARERIIDIASTQFEDGSAYHQYQPLTKRGNHTLGGGFNDDPLWLILSTTDYIKESGDMGILDEMVPYDNDESKATTHFEHLKRSFYFTVNNLGPHGLPLIGRADWNDCLNLNCFSEDPNESFQTTGNKKGFTAESLMIAGSFVLYGKEFIKLCQVLGKDDDAAEAQKHVDAMIEAVKKDGWDGEWYLRAYDYYGKKVGSSENEEGKIFIESQGFCGMAGIGVEDGLVHKSMDSVKEHLDCEYGIVLQQPAFTKYYIEYGEISTYPAGYKENAGIFCHNNPWIMIAEAQIGNGDRAFEYYRKVAPAYLEEISDLHKVEPYVYCQMIAGKDAFKPGEGKNSWLTGTAAWNYVAITQYILGVKPDYNGLSINPSIPSKWDGYKITRRFRGATYHIEVSNPSHVSNGVSSMEVDGKTIEGCIVPIQPEGTEVTVKVTLGK

SEQ ID NO: 58 - protein, 822 aa, Spirochaeta thermophila
MKFGDFDDARKEYVITTPRTPYPWINYLGQEAFFSLVSNFAGGYSFYRDARFRRITRYRYNNVPTDEGSRFFYIKDGTTIWSPAWKPARTPLDRYECRHGMGYTIITGEKEGVEVRIRFFVPRGVHAELQDVVITNKGHRPKDLTFYAGLEWCLWNALDDFTNFQRNFSTGEVEIADSVIYHKTEYRERRNHYAFYASTTPHSGFDSDRETFFGLYNGFQDSRAVLEGTTYQSVADGWAPIAVHRFDLHLEPGESRSLTLILGYVENPDDEKWEAPGIINKKPARAIIDRFSKKEEVDRAFADLKAYWDDLLGRFVLTHKEEKLMRQVNIWNQYQCIVTYHMARSASYFESGIGRGIGFRDTNQDILGSMHQIPALARQRILDVAATQMEDGGCYHQYQPLTKRGNNDIGGDFNDDPLWLILSTAAYIKETGDWSILDEQVPFDHDPAMAAPLLEHLRRSFYHVVNNLGPHGLPLIGRADWNDCLNLNCFSTNPDESFQTADNKKGRTAESVFIAGLFVYAGRDYVEICRRQGLEEEANQAEQHIQNMIRTVEEHGWDGEWYLRAYDYYGRKVGSKDCEEGKIFIEPQGMCGMAEIGKDKGYPIKALDSVKKHLDTKYGIVLQQPAYSRYYVELGEISSYPPGYKENAGIFCHNNPWVMIAEAKAGRGSRAWEYYRKIAPAYLEDISEIHRTEPYVYAQMIAGKDARRHGEAKNSWLTGTAAWNFVAISQWILGIRPEFDGLVIDPCIPAEWEGYTVKRIYRGATYEITVENPSHVEKGVARLFIDGREVPVNEHRGPTETGVILPLAPEGTTVKVRAVLGS

SEQ ID NO: 59 - protein, 827 aa, Ruminococcus sp.
MKFGFFDDANKEYVITSPRTPYPWINYLGTQEFFSLISNTAGGYSFYKDARLRRITRYRYNNVPIDMGGRYFYINDNGTIWNPGWSPAKTELDSYECRHGMGYTIITGKKNDLKAQATFFVPQNYAGEVQQLVLTNEGSASKTFKLFSFAEWCLWDAQDDCTNFQRNFSTGRVEVVGSTIYHKTEYRDRRDHFAFYTVNDTIDGYDTDRDAFIGLYNGFHNPQAVIDGKATDSFADGWSPIASHYKEITLAPGESKTLVFILGYVEMPVDQKFEADGKTINKVKALQMMEQYNTPEKVAAGLAELKAAWDSLLGILNVDTPDDKVNRMVNIWNQYQCMVTFNLSRSASYFESGIGRGMGFRDSNQDILGFVHQIPDRARQRIIDIASTQLPDGGCYHQYQPLTKKGNSDIGGDFSDDPLWMILSVSAYIKETGDWGILDEMVPYDNDDSKAKPMLDHLKVSFYKVVNNLGPHGLPLAMRADWNDCINLSCYSDTPGESFQTYTNPKFAAEGGYSKVAESVMVATLFTYTGPNYVAILKHLGKEDEAAAAQAEIDKMKQNVMAHAFDGDWFLRAYDSTGAKMGSKECEEGKIFIEPQGFAVMSEIGKDQGADIKTLDAIDKYLNTDFGLVLNNPAYTRYYIQYGEISTYPGGYKENAGIFTHNNAWIICAEAYAGRGDKAFEYYSKIAPAFTEETSDIHKTEPYVYGQMIGGKDAGADIGKPGNHFGQGKNSWLTGTAAWNMVAISQYILGISPDWDGLKIDPSVPHAWDGMTATRQFRGATYDITVKNPDHVCKGVKSVTVDGNAIEGNVLPAFGDGKHHAVEVIMG

SEQ ID NO: 60 - protein, 812 aa, Dysgonomonas mossii
MKFGYFDDQRREYVITNPQTPWPWINYLGNEDFFSLISNTAGGYSFYKDAKFRRITRYRYNNVPMDNGGRYFYINDGGTVWSPGWKPCKTELDKYECRHGMSYTTITGEKNGIEAEVLFFVPLKTWAEVQKVKLTNKSTETKRFKLFSFAEWCLWNAATDMENFQRNFSTGEVEIEDSVIYHKTEYKERRNHYAYYSVNAPIQGFDTDRESFIGLYNEFRDPQAVMAGKPSNSVAHGWSPIASHYLEIELQPGETKELIFVLGYVEYENREDKWESKGVINKSKAKETIAKFDTVAKVQAAFDELKTYWDNLLSSYVLKSNEEKLDRMVNIWNQYQCMVTFNFSRSASFFESGIGRGMGFRDSNQDLVGFVHQIPARARQRIIDIASTQFSDGGCYHQYQPLTKRGNNDIGGGFNDDPMWLIFGTIAYLKETGDFSILDEAVPFDNQAGTEKSLFHHLTVSFNHVIENLGPHLLPLIGRADWNDCLNLNCFSWDPNESFQTTENKTEGSKAESLMIAGLFIVCGQDYVTLCRQIGNNQEADRAQGYIDSMIEAVKKHGWDGDWYLRAYDYYGKKIGSNENKEGKIFIESQGWCAMAKVGLEEGMVEKSLDSVKKYLDTPNGIVLNNPAFTEYVVEYGEISSYPAGYKENAGIFCHNNPWIMIAETILGRGDYAWEYYRKICPSYTEEISELHKVEPYVYSQMIAGKDAFKPGEAKNSWLTGTAAWNYYAITQFILGIKPDYNGLEVNPCIPSDWKGFEVTRKFRDATYLIYIKNTGVNRGVKSITVNGKALSGNIIPLQPAGSVNKIEVVLG

SEQ ID NO: 61 - protein, 822 aa, Spirochaeta thermophila
MKFGHFDDVRKEYVITSPQTPYPWINYLGQEAFFSLVSNFAGGYSFYRDARFRRITRYRYNNIPTDEGSRFFYVKDGATIWSPAWKPARTPLDRYECRHGMGYTIITGEKDGVEVRIRFFVPRGVHAELQDVVITNKGHRPKDLTFYAGLEWCLWNALDDFTNFQRNFSTGEVEIADSVIYHKTEYRERRNHYAFYASTTPHSGFDSDRETFFGLYNGFQDPGAVLEGTTYQSVADGWAPIAVHRFDLHLEPGESRSLTLILGYVENPDEEKWEAPGIINKKPARAVIDRFSSPDEVERAFTDLEAYWDDLLGRFVLTHKEEKLMRQVNIWNQYQCIVTYHMARSASYFESGIGRGIGFRDTNQDILGSMHQIPELAKQRILDVAATQMEDGGCYHQYQPLTKRGNNDIGGDFNDDPLWLILSTAAYIKETGDWSILDEQVPFDHDPAKAAPLLEHLRRSFYHVVNNLGPHGLPLIGRADWNDCLNLNCFSTNPDESFQTADNKKGRTAESVFIAGLFVFAGRDYVEICRRKGLEEEAREAERHIDEMIEAVEEHGWDGEWYLRAYDYYGRKVGSKECEEGKIFIEPQGMCGMAEIGKDKGYPLKALDAVKKHLDTPYGIVLQQPAYSGYYIELGEISSYPPGYKENAGIFCHNNPWVMIAEARAGRGSRAWEYYRKIAPAYLEDISEIHRTEPYVYAQMIAGKDARRHGEAKNSWLTGTAAWNFVAISQWILGIRPEFDGLVIDPCIPAEWDGYTVKRIYRGATYEITVENPSHVEKGVARLFIDGREVPVNEHRGPTETGVILPLAPEGTTVKVRAVLGS

SEQ ID NO: 62 - protein, 816 aa, Reinekea sp.
MTQTENSYGYFDDDQREYVITEPKTPYPWINYLGDTDFFSLISNTSGGYSFYRDAKFRRLTRYRYNNVPVDTGGRYFYIKDGDTTWSPAWKPLKTELDQYECRHGMGYTRIRGEKNGVSSSVLFFVPKGENLEVQQMTLTNHSQEVKTLKLFSFVEWCLWNAEDDMTNFQRNFSTGQVEVQDSVIYHKTEYRERRNHFAFYSVNADISGFDTDRDVFLGDYNGFDTPDTVARGEANNSIAHGWSPIASHAIEVTLQPGESRDLIFTLGYVEMPDDDKWEAPQVINKTKALAAIERFNTSEKVQAAFDALNRYWDELLGRYVVDSDDARLNRGVNIWNQYQNMVTFNMSRSASFFESGIGRGMGFRDSNQDLIGFVHLVPERARERIIDIASTQFEDGSAYHQYQPLTKRGNAAIGGNFNDDPMWLIQSVTVYVKETGDFSILEEDVPFNNDPDNSAKLFDHLTRSFNHVVNNRGEHGLPLIGRADWNDCLNLNCFSSDPNESFQTTENQEGGRAESLMIAGQFVLFGKDYIELCRELGKADEARRAQDHVDAMVEAVKTHGWDGDWFLRAYDAAGNKLGTHEHDESKIFIESQGFCGMAGIGLEDGLVEKSLSAVNEHLACDYGIVLNAPAFTKYHIEYGEISTYPQGYKENGGIFCHNNPWIMIAETVVGNGDRAFDYYTRIAPAYQDDKVKLHKTEPYVYAQMIAGKEAATPGQAKNSWLTGTAAWNYVAITQSILGIKPHYQGLQVDPCIPKAWDSYRVTRVFRGVTYQIQINNPAHVCRGVASMTVNGDAVEGNIIPLQSEGSTVEVVVTLG

SEQ ID NO: 63 - protein, 829 aa, Ruminococcus flavefaciens
MKFGFFDDANKEYVINSPRTPYPWINYLGNQGFFSLISNTAGGYCFYKDARLRRITRYRYNNVPLDMGGRYFYINDNGTVWNPGWSPVKTELDEYECRHGMGYTVIKGKKNGLKAEVTFFVPQNYDGEVQQVVLTNESKEAKSFSIFSIAEWCLWDAQDDCTNFQRNFSTGRVEIEGSTIYHVTEYRDRRNHYAFYTVNDEIDGYDTDRDAFLGSIYNGWDNPETVMNDKPSNSFADGWSPVASHYKKVTLAPGESKTLIYILGYAENPQDKKFAAEKPANLLTRETWVLNKEKAYAMIEKYNTPEKVAAGLEDLRNTWESLLSIFNVNTPDDKVDRMVNIWNQYQCMVTFNLSRSASYFESGIGRGMGFRDSNQDILGFVHQIPERARERLIDIASTQLSDGGCYHQYQPLTKKGNADIGGDFSDDPLWMILSVAAYIKETGDWGILDANVPFDDDPSGKHTMLEHLNVSFYHIVNNLGPHGLPLAMRADWNDCINLSCFSDTPGESFQTYTNPKFAAEGGYSKVAESAFVAALFTYTGPAYVGILKHIGKADEAEKAQAEIDKMKKNVMESAFDGDWFIRAYDANGEKMGSKECEEGKIFIEPQGFAVMSEIGKDVGADIKTLNSIDKYLNCEYGLVLNNPAFTKYYIQYGEISTYPGGYKENAGIFTHNNAWIICAEAYVGRGDKAFEYYSKIAPAFTEETSDIHKTEPYVYGQMIGGKDAKNFGQGKNSWLTGTAAWNMVAISQYILGVQPDFDGLRVDPSIPAAWDGFTATRKFRGATYNITVKNPDHVNKGVKTMTVDGKAIEGCIVPVCEGGTHEVVITLGK

SEQ ID NO: 64 - protein, 812 aa, Paludibacter propionicigenes
MKYGHFDDNRREYVITNPRTPWPWINYLGNEDFFSLVSNTGGGYSFYKDAKFRRITRYRYNNVPMDSGGKYFYINDGESVWSPGWKPCKTELDSYECRHGMNYTTIKGVKNGVEAEALYFVPLKTWAEVQKLTLRNTTNEVKTLKIFSFVEWCLWNAATDMENFQRNFSTGEVEIEDSVIYHKTEYKERRDHFAYYSVNEPMQGFDTDRETFFGLYNGFDEPQTVLEGAPRNSEAHGWSPIASHYVEVVLQPGESKELVYVLGYVENAQDEKWESKNVINKTKAKATIARFDTAAKVDAALAELNAYWDNLLNVFTIKTGEEKLDRMVNIWNQYQCMITFCFSRSASFFESGIGRGMGFRDSNQDLVGFVHQIPERARERIIDIASTQFPDGGCYHQYQPLTKKGNNEIGQGFNDDPMWLILGTTAYIKESGDFTILDEPVPFDNEVGSEVSLFHHLTVSFNHVVNNLGPHGLPLSGRADWNDCLNLNCFSNDPNESFQTTENKSEGSQAQSLMIAGLFVVYGRDYVELCKVIGKTEEAARAQQHIDAMVAAIKLNGWDGDWFIRAYDYFGNKIGSNENEEGKIFIESNGWCTMAGIGLEEGMVAKALDSVKERLDCEHGIVLNNPAYTKYYIEYGEISSYPPGYKENAGIFCHNNPWIIIGETVQGRGDRAWEYFRKICPSYTEEISDLHKVEPYVYAQMIAGKDAFKPGEAKNSWLTGTAAWNYYAITQYILGIQPTYNGLRIEPCIAPEWKGFTVTRKFRGATYLIEVKNPNGSMKGVASLTVDGKAIEGNTIPLMPVGGTYKVEVVMN

SEQ ID NO: 65 - protein, 827 aa, Ruminococcus albus
MKFGFFDDANKEYVITEPRTPYPWINYLGSQAFFSLISNTAGGYSFYKDARLRRITRYRYNNVPIDMGGRYFYINDNGTVWNPGWSPVKTELDAYTCRHGMGYTIIKGEKNGLEAEVTFFVPNNYNGEVQKVVLTNKSGAEKTFKLFSFAEWCLWDAQDDCTNFQRNFSTGRVEVDGSVIYHKTEYRDRRDHYAFYSVNDSIDGYDTDRDSFIGLYNGFNDPQAVMAGKANDSFADGWSPIASHYKEIKLGAGESKTLIFILGYVEMPVDQKFEADGKTINKVKAKAMMEQFDTPEKVDAGLAELKASWDKLLGILNVDTPDDKVDRMVNIWNQYQCMVTFNLSRSASYFESGIGRGMGFRDSNQDILGFVHQIPDRARERIIDIASTQLPDGGCYHQYQPLTKKGNSDIGGDFSDDPLWMILSVSAYIKETGDWGILDEMVPYDNDESKAQPMLDHLKVSFYHIVNNLGPHGLPLAMRADWNDCINLSCYSDTPGESFQTYTNPKFAAEGGYSKVAESVMVATLFTYTGPNYVAILKHLGKDDEAAAAQAEIDKMKKNVMASAWDGDWFLRAYDSEGKKMGSKECEEGQIFIEPQGFAIMSEIGKEQGADKKTLAAIDERLNTKFGLVLNNPAFTKYYIQYGEISTYPGGYKENAGIFTHNNAWIICAAAYAGQGDQAFKYYSEIAPAFTEETSDIHKTEPYVYGQMIGGKDAGSDIGRPGKNFGQGKNSWLTGTAAWNMVAISQYILGVQPDFDGLKIDPSIPAAWDGFNITRKFRGNTYNIAVKNPDHVCKGIKSVTVDGKKIDGIVMPVFEAGSVHEVEVVMG

SEQ ID NO: 66 - protein, 827 aa, Ruminococcus albus
MKFGKFDDVNKEYVITEPRTPYPWINYLGSQAFFSLISNTAGGYSFYKDARLRRITRYRYNNVPIDMGGRYFYINDNGTVWNPGWSPVKTELDAYTCRHGMGYTIIKGEKNGLEAEATFFVPNNYNGEVQQVVLTNKSGAAKTFKLFSFAEWCLWDAQDDCTNFQRNFSTGRVEVDGSVIYHKTEYRDRRDHYAFYSVNDSIDGYDTDRDAFIGLYNGFGDPQAVIAGKATDSFADGWSPIASHYKEITLAAGESKTLIFILGYVEMPVDQKFEADGKTINKVKAKAMIEQFNTPEKVAAGLAELKESWDKLLGILNVATPDDKVDRMVNIWNQYQCMVTFNLSRSASYFESGIGRGMGFRDSNQDVLGFVHQIPDRARERIIDIASTQLPDGGCYHQYQPLTKKGNSDIGGDFSDDPLWMILSVSAYIKETGDWGILDEMVPYDNDESKAQPMLDHLKVSFYHIVNNLGPHGLPLAMRADWNDCINLSCYSDTPGESFQTYTNPKFAAEGGYSKVAESVMVATLFTYTGPNYVAILKHLGKDDEAAAAQAEIDKMKKNVMESAWDGNWFLRAYDANGEKMGSKECEEGQIFIEPQGFAIMSEIGKEQGADKKTLAAIDERLNTKFGLVLNNPAFTKYYIQYGEISTYPGGYKENAGIFTHNNAWIICAAAYAGEGDQAFKYYSEIAPAFTEDTSDIHKTEPYVYGQMIGGKDAGADIGRPGKNFGQGKNSWLTGTAAWNMVAISQYILGVQPDFDGLKIDPSIPSAWDGFNITRKFRGNTYNITVKNPDHVCKGIKAVTVDGTKINGNVMPVFEAGSTHEVEVVMG

SEQ ID NO: 67 - protein, 819 aa, Halothermothrix orenii
MKYGYFDDRAREYVINNPETPYPWINYLGSKNYFCLLSNTAGGYSFYKDARLLRITRYRYNNVPIDAGGKYYYIYEDGEYWSPTWAPVKAKLDYYQCQHGLGYSVITGERKNISTEILYFVPVDDNCEIHRLKIKNNGSSVRKIKLFSFVEFCLWDAYDDMTNFQRNLSTGEVEVEGSTIFHKTEYRERRNHFSFFTVNSNISGFDTDRESFIGLYNGFHEPQVVVSGRPGNSIASGWSPIGSHCLEIVLQPGEEQSYIFILGFMENNPDNKWSSCGGINKDKAYSMIRRYNSDIKVDNALQQLKSYWDDLLSGFYLESGDDRLDRMVNTWNQYQCMVTFNLARSASYFESGISRGIGFRDSNQDLLGVVHMVPERARERLIDLARTQFEDGSTYHQYQPLTKEGNNEIGSGFNDDPLWLILGTAAYIKETGDISILNEEVSFNNGKEATLFDHLLASFNHVVLNKGPHGLPLIGRADWNDCLNLNCFSTDPGESFQTTTNKDDGQAESVLIAGMFVTIGPEFVKMCRFIGKDEIADRAQSEIEDMKKAVMEHGRDKNWFLRAYDYYGNKVGSIDNNEGQIYIEPQGFCVMGGLGIESGFARKALDSVKERLDTEYGLVLLDPPYKQYYPELGEISSYPPGYKENGGIFCHANPWIMIAETVLGRGNNAFEYYKKIAPAYLEEISDIHRMEPYVYAQMIAGKDAVNHGEAKNSWLTGTAAWNYVAITHYILGIRPEYEGLKIDPCIPEEWSGFYVEKRFRGKVYKIHVNNPAKVSKGVKHIKVDGEIIEGNLIRIPLENQARENVNDNTTQHIVEVIMG

SEQ ID NO: 68 - protein, 827 aa, Coprococcus sp.
MKFGYFDDANKEYVITSPRTPYPWINYLGTQDFFSLISNTAGGYSFYKDARLRRITRYRYNNVPIDMGGRYFYINDNGTIWNPGWSPVKTELDEYQCRHGMGYTIITGKKNDLKAEVTFFVPQNYAGEVQQVVLTNEGSEEKTFSFFSFEEWCLWDAQDDCTNFQRNFSTGRVEVVGSTIYHKTEYRDRRDHFAFYTVNDEIDGYDTDRDSFIGLYNGFHNPQAVEAGKSNDSFADGWSPIASHYKKITLAPGETKTLVFILGYVEMPVDQKFEADGKTINKVKALEMIEKYNTPEKVAAGLEELKEHWNRLLSILNVNTPDDKVNRMVNIWNQYQCMVTFNLSRSASYFESGIGRGMGFRDSNQDVLGFVHQIPDRARERIIDIASTQFPDGGCYHQYQPLTKKGNADIGGDFSDDPLWLILSVSAYIKETGDWGILDEMVPYDNDMSIAKPMLDHLKVSFYKIVNNLGPHGLPLAMRADWNDCINLSCFSDTPGESFQTYTNPKFAAEGGYSKVAESVMVATLFTYAGPNYVAILKHLGMDAEADAAQAEIDKMKANIMESAWDGDWFLRAYDANGEKMGSKECEEGQIFIEPQGFAIMSDIGKDQGCDKKTLAAIDERLNTQHGLVLNNPAFTKYYIQYGEISTYPGGYKENAGIFTHNNAWIICAAAYAGAGDQAFKYYSEIAPAFTEETSDIHKTEPYVYGQMIGGKDAGSDIGKPGNHFGQGKNSWLTGTAAWNMVAISQYILGISADFDGLKIDPSIPAAWDGMTATRQFRGATYDIKVSNPAHINKGVKSVLVDGNAIEGNVIPAFGDGKTHSVEVVMG

SEQ ID NO: 69 - protein, 827 aa, Clostridium sp.
MKFGYFDDANKEYVITSPRTPYPWINYLGTQDFFSLISNTAGGYSFYKDARLRRITRYRYNNVPIDMGGRYFYINENGTIWNPGWSPVKTELDEYECRHGMGYTVITGKKNNLKAEVTFFVPQNYAGEVQQVVLTNESSEEKTFSFFSFEEWCLWDAQDDCTNFQRNFSTGRVEVVGSTIYHKTEYRDRRDHFAFYTVNDEIDGYDTDRDSFIGLYNGFHNPQAVEAGKANDSFADGWSPIASHYKKITLAPGETKTLVFILGYVEMPVDQKFEADGKTINKVKALEMMEKYNTPEKVAAGLAELKEHWNNLLSILNVNTPDDKVNRMVNIWNQYQCMVTFNLSRSASYFESGIGRGMGFRDSNQDILGFVHQIPDRARERIIDIASTQFPDGGCYHQYQPLTKKGNADIGGDFSDDPLWLILSVSAYIKETGDWGILDEMVPYDNDMSIAKPMLDHLKVSFYKIVNNLGPHGLPLAMRADWNDCINLSCFSDTPGESFQTYTNPKFAAEGGYSKVAESVMVATLFTYAGPNYVAILKHLGMDAEAEAAQAEIDKMKANIMESAWDGDWFLRAYDANGEKMGSKECKEGQIFIEPQGFAIMSDIGKDQGCDKKTLAAIDERLNTQYGLVLNNPAFTKYYIQYGEISTYPGGYKENAGIFTHNNAWIICAAAYAGAGDQAFKYYSEIAPAFTEETSDIHKTEPYVYGQMIGGKDAGSDIGKPGNHFGQGKNSWLTGTAAWNMVAISQYILGISADFDGLKIDPSIPAAWDGLNATRQFRGATYDIKVTNPDHVNKGIKSVTVDGNAIEGNVLPVFGDGKTHAVEVVMG

SEQ ID NO: 70 - protein, 827 aa, Coprococcus eutactus
MKFGYFDDANKEYVITSPRTPYPWINYLGTQDFFSLISNTAGGYSFYKDARLRRITRYRYNNVPIDMGGRYFYINDNGTIWNPGWSPVKTELDEYQCRHGMGYTIITGKKNDLKAEVTFFVPQNYAGEVQQVVLTNEGSEEKTFSFFSFEEWCLWDAQDDCTNFQRNFSTGRVEVVGSTIYHKTEYRDRRDHFAFYTVNDEIDGYDTDRDSFIGLYNGFHNPQAVEAGKANDSFADGWSPIASHYKKITLAPGETKTLVFILGYVEMPVDQKFEADGKTINKVKALEMIEKYNTPEKVAAGLKELKEHWNRLLGILNVNTPDDKVNRMVNIWNQYQCMVTFNLSRSASYFESGIGRGMGFRDSNQDVLGFVHQIPDRARERIIDIASTQFPDGGCYHQYQPLTKKGNADIGGDFSDDPLWLILSVSAYIKETGDWGILDEMVPYDNDMSIAKPMLDHLKVSFYKIVNNLGPHGLPLAMRADWNDCINLSCFSDTPGESFQTYTNPKFAAEGGYSKVAESVMVATLFTYTGPNYVAILKHLGMDAEADAAQAEIDKMKANIMESAWDGDWFLRAYDANGEKMGSKECEEGQIFIEPQGFAIMSDIGKDQGCDKKTLAAIDERLNTQHGLVLNNPAFTKYYIQYGEISTYPGGYKENAGIFTHNNAWIICAAAYAGAGDQAFKYYSEIAPAFTEETSDIHKTEPYVYGQMIGGKDAGSDIGKPGNHFGQGKNSWLTGTAAWNMVAISQYILGISADFDGLKIDPSIPAAWDGMTATRQFRGATYDIKVSNPDHINKGVKSVVVDGNAIEGNVIPAFGDGKTHTVEVVMG

SEQ ID NO: 71 - protein, 821 aa, Roseburia intestinalis
MYMEDFIMKFGYFDDTNKEYVITSPKTPLPWINYLGSENFFSLISNTCGGYSFYKDAKLLRLTRYRYNNVPLDSNGHYYYVKDGDTIWNPGWMPSKTELDAYSCRHGMGYSVFKGTKNKLTAELTSFVPVGETCEVGKLSLTNESNETRNFSVFSYVEFCLWNAMDDMTNFQRNFSTGEVEIHGSALYHKTEYRERRNHYAVYAVNAPIAGFDTDRDSFLGAYGENSAPEVVVNGTSKNSVASGWAPIGSHHLEVSLAPGETKTYVFVLGYVENPVEEKWVGRAEDGVINRKRADELLSRFDTAEKADAALVKLKDYWNELLSHFTISSSEEKLDRMVNIWHQYQCMVTFNMSRSASYFESGIGRGMGFRDSCQDLLGFVHLIPDRARERILDIAATQFEDGSAYHQYQPLTKKGNSDIGSGFNDDPLWLIAGTAAYIKETGDYSILDEMTPYDSDASKATTFMEHLRRSFHYTMEHLGPHNLPLIGRADWNDCLNLNCFSTEPGESFQTFGPSEGPNAESVFIAGMFVRYGKDYAAICRHQGMTEEAELAEKAIAEMEKTVMDAGWDGEWYLRAYDHYKNKIGSKECEDGKIFIEPQGFCVMAEIGLEEGCCLKAMESVEKYLDTKYGIVLLQPPYHRYHVELGEISSYPPGYKENAGIFCHNNPWISIAETVIGRGNRAWQVYTRTCPAYIEDISEIHRTEPYVYSQMIAGKDAPNFGEAKNSWLTGTAAWTFLNVSQFILGIRPDYDGLTVDPCIPSKLDGFTAKRDFRGVSYHITVKNPNHVEKGVLSMIVDGQPVEGTTIPFSAEKKDVNVEVTMG

SEQ ID NO: 72 - protein, 814 aa, Roseburia intestinalis
MKFGYFDDTNKEYVITSPKTPLPWINYLGSENFFSLISNTCGGYSFYKDAKLLRLTRYRYNNVPLDSNGHYYYVKDGDTIWNPGWMPSKTELDAYSCRHGMGYSVFKGTKNKLTAELTSFVPVGETCEVGKLSLTNESNEIRNFSVFSYVEFCLWNAMDDMTNFQRNFSTGEVEIHGSALYHKTEYRERRNHYAVYAVNAPIAGFDTDRDSFLGAYGENSAPEVVVNGTSKNSVASGWAPIGSHHLEVSLAPGETKTYVFVLGYVENPVEEKWVGRAEDGVINRKRADELLSRFDTAEKADAALVKLKDYWNELLSHFTISSSEEKLDRMVNIWHQYQCMVTFNMSRSASYFESGIGRGMGFRDSCQDLLGFVHLIPDRARERILDIAATQFEDGSAYHQYQPLTKKGNSDIGSGFNDDPLWLIAGTAAYIKETGDYSILDEMTPYDSDASKATTFMEHLRRSFHYTMEHLGPHNLPLIGRADWNDCLNLNCFSTEPGESFQTFGPSEGPNAESVFIAGMFVRYGKDYAAICRHQGMTEEAELAEKAIAEMEKTVMDAGWDGEWYLRAYDHYKNKIGSKECEDGKIFIEPQGFCVMAEIGLEEGCCLKAMESVEKYLDTKYGIVLLQPPYHRYHVELGEISSYPPGYKENAGIFCHNNPWISIAETVIGRGNRAWQVYTRTCPAYIEDISEIHRTEPYVYSQMIAGKDAPNFGEAKNSWLTGTAAWTFLNVSQFILGIRPDYDGLTVDPCIPSKLDGFTAKRDFRGVSYHITVKNPNHVEKGVLSMIVDGQPVEGTTIPFSAEKKDVNVEVTMG

SEQ ID NO: 73 - protein, 828 aa, Bacteroides sp.
MQDKRFGYFDDDNREYVITDPKTPWPWINYLGNEDFFSLISNTAGGYSFYKDAKFRRITRYRYNNVPMDNGGRYFYINEGGNVWSPTWKPCKTALDSYECRHGMSYTRITGSKDGIEASLLFFVPLKTWGEVQKLTLRNTSAKVRKLKLFSFAEWCLWNAATDMENFQRNFSTGEVEVDGSVIYHKTEYKERRNHYAFYSVNTPVDGFDTDRETFVGLYNEFADPERVVEGRPGNSIAHGWSPIASHYLEVELQPGESRDFIFLLGYVENKQEAKFEEREESLHEAFKQSVPSSPIINKVKAKAMISAFDTTAKVDAAFAELKAYWDRLLDIYVVKTDEEKLDRMVNIWNQYQCMITFNMSRSASFFESGIGRGMGFRDSNQDLVGFVHQIPERARERIIDIASTQFPDGGCYHQYQPLTKRGNNDIGGGFNDDPMWLIFGTVAYIKESGDFSILDEPVPFDNKEGSEVSLFEHLRVSFNHVIENLGPHMLPLIGRADWNDCLNLNCFSWDPNESFQTTENQTEGSQAESLMIAGLFVVCGRDYVELCRRLGKDDEANRAQTYIDNMVEAVKKHGWDGDWYLRAYDYFGHKVGSKENEEGQIFIESQGWCTMAGIGLEEGMVKKALDSVKERLDCEHGIVLNNPPFTRYVVEYGEISTYPAGYKENAGIFCHNNPWVIIGETVLGRGDRSWEYFRKICPSYTEEHSALHKVEPYVCCQMVAGKDAARPGEGKNSWLTGTAAWMWYAITQFILGIKPSYEGLEINPCIPAGWKGFNVKRRFRGAEYHITVKNPDGVCKGIKSVTVDGQPIEGNVVNHLPGTHTVEVIMG

SEQ ID NO: 74 - protein, 828 aa, Bacteroides uniformis
MQDKRFGYFDDDNREYVITDPKTPWPWINYLGNEDFFSLISNTAGGYSFYKDAKFRRITRYRYNNVPMDNGGRYFYINEGGNVWSPTWKPCKTALDSYECRHGMSYTRITGSKDGIEASLLFFVPLKTWGEVQKLTLRNTSAKVRKLKLFSFAEWCLWNAATDMENFQRNFSTGEVEVDGSVIYHKTEYKERRNHYAFYSINTPVDGFDTDRETFVGLYNEFADPERVVEGRPGNSIAHGWSPIASHYLEVELQPGESRDFIFLLGYVENKQEAKFEEHEASQHEAFKQSVPSSPIINKVKAKAMISAFDTTAKVDAAFAELKAYWDRLLDIYVVKTDEEKLDRMVNIWNQYQCMITFNMSRSASFFESGIGRGMGFRDSNQDLVGFVHQIPERARERIIDIASTQFPDGGCYHQYQPLTKRGNNDIGGGFNDDPMWLIFGTVAYIKESGDFSILDEPVPFDNKEGSEVSLFEHLRVSFNHVIENLGPHMLPLIGRADWNDCLNLNCFSWDPNESFQTTENQTEGSQAESLMIAGLFVVCGRDYVELCRHLGKDDEANRAQTYIENMVEAVKKHGWDGDWYLRAYDYFGHKVGSKENEEGQIFIESQGWCTMAGIGLEEGMVKKALDSVKERLDCEHGIVLNNPPFTRYVVEYGEISTYPAGYKENAGIFCHNNPWVIIGETVLGRGDRSWEYFRKICPSYTEEHSALHKVEPYVCCQMVAGKDAARPGEGKNSWLTGTAAWMWYAITQFILGIKPSYEGLEINPCIPAGWKGFNVKRRFRGAEYHITVKNPDGVCKGIKSVTVDGQPIEGNVVNHLPGTHTVEVIMG

SEQ ID NO: 75 - protein, 828 aa, Uncultured organism
MQDKRFGYFDDDNREYVITDPKTPWPWINYLGNEDFFSLISNTAGGYSFYKDAKFRRITRYRYNNVPMDNGGRYFYINEGGNVWSPTWKPCKTALDSYECRHGMSYTRITGSKDGIEASLLFFVPLKTWGEVQKLTLRNTSAKVRKLKLFSFAEWCLWNAATDMENFQRNFSTGEVEVDGSVIYHKTEYKERRNHYAFYSVNTPVDGFDTDRETFVGLYNEFADPERVVEGRPGNSIAHGWSPIASHYLEVELQPGESRDFIFLLGYVENKQEEKFEEREESLHEAFKQSVPSSPIINKVKAKAMISAFDTTAKVDAAFAELKAYWDRLLDIYVVKTDEEKLDRMVNIWNQYQCMITFNMSRSASFFESGIGRGMGFRDSNQDLVGFVHQIPERARERIIDIASTQFPDGGCYHQYQPLTKRGNNDIGGGFNDDPMWLIFGTVAYIKESGDFSILDEPVPFDNKEGSEVSLFEHLRVSFNHVIENLGPHMLPLIGRADWNDCLNLNCFSWDPNESFQTTENQTEGSQAESLMIAGLFVVCGRDYVELCRRLGKDDEANRAQTYIENMVEAVKKHGWDGDWYLRAYDYFGHKVGSKENEEGQIFIESQGWCTMAGIGLEEGMVEKALDSVKERLDCEHGIVLNNPPFTRYVVEYGEISTYPAGYKENAGIFCHNNPWVIIGETVLGRGDRSWEYFRKICPSYTEEHSALHKVEPYVCCQMVAGKDAARPGEGKNSWLTGTAAWMWYAITQFILGIKPSYEGLEINPCIPSDWKGFNVKRKFRGAEYHITVKNPDGVCKGIKSVTVDGKPVEGNVVKHLPGTHTVEVIMG

SEQ ID NO: 76 - protein, 817 aa, Eubacterium rectale
MKFGHFDDQNKEYVITSPRTPLPWINYLGCENFFSLVSNTCGGYSFYKDAKLLRLTRYRYNNVPYDSNGHYYYIKDGDTIWNPGWMPSKTELDSYECRHGMGYSVFTGVKNGLMAQLTDFVPMGSTCEINKLTLKNTSDKKKDFSVFSYVEFCLWNAMDDMTNFQRNFSTGEVEIHVGGSQLFHKTEYRERRNHYAVYAVNASVDGFDTDRDSFLGAYGENSAPSVVVNDQSKNSVASGWAPVGSHHLKVALEPGEEKTYIFVLGYVENPVNEKWVGRAEDGIINRAPADALLARFDTTEKADAALAELKAYWDKLLGHFSISSSEEKLDRMVNVWHQYQCMVTFNMSRSASYFESGIGRGMGFRDSCQDLLGFVHLIPDRARERILDIAATQFEDGSAYHQYQPLTKKGNADIGSGFNDDPLWLIAAAAAYIKETGDYSILDESTPYDSDPSKATDFMEHLRRSFNYTINHLGPHGLPQIGRADWNDCLNLNCFSEEPGESFQTFGPSEGPNAESVFIAGMFVKYGKDYVKICRHKGLCDEADTAQKAIEQMEKTVMDAGWDGEWYLRAYDHYKHKIGSKECEDGKIFIEPQGFCVIAEIGKDEGLCLKAMQSVEKYLDTKYGIVLLQPPYHRYHVELGEISSYPPGYKENAGIFCHNNPWISIAETVIGRGNRAWQVYTRTCPAYIEDISEIHRTEPYVYSQMIAGKDAPNFGEAKNSWLTGTAAWTFLDVSQYILGIRPDYDGLIIDPCIPDTMDGFTAKRKFRGNTYHITVRNPAHVQKGVTKLIVDGATIDGNMIPAINGTGHDVTVEVTMG

SEQ ID NO: 77 - protein, 817 aa, Eubacterium rectale
MKFGHFDDQNKEYVITSPRTPLPWINYLGCENFFSLVSNTCGGYSFYKDAKLLRLTRYRYNNVPYDSNGHYYYIKDGDTIWNPGWMPSKTELDSYECRHGMGYSVFTGIKNGLMAQLTDFVPMGSTCEINKLTLKNTSDKKKVFSVFSYVEFCLWNAMDDMTNFQRNFSTGEVEIHAGGSQLFHKTEYRERRNHYAVYAVNASVDGFDTDRDSFLGAYGENSAPSVVVNDQSKNSVASGWAPVGSHHLKVALEPGEEKTYIFVLGYVENPVNEKWVGRAKDGIINRAPADALLARFDTTEKADAALAELKAYWDKLLGHFSISSSDEKLDRMVNVWHQYQCMVTFNMSRSASYFESGIGRGMGFRDSCQDLLGFVHLIPDRARERILDIAATQFEDGSAYHQYQPLTKKGNADIGSGFNDDPLWLIAAAAAYIKETGDYSILDESTPYDSDPSKATDFMEHLRRSFNYTINHLGPHGLPQIGRADWNDCLNLNCFSEEPGESFQTFGPSEGPNAESVFIAGMFVKYGKDYVKICRHKGLCDEADTAQKAIKQMEKTVMDAGWDGEWYLRAYDHYKHKIGSNECEDGKIFIEPQGFCVIAEIGKDEGLCLKAMQSVEKYLDTKYGIVLLQPPYHRYHVELGEISSYPPGYKENAGIFCHNNPWISIAETVIGRGNRAWQVYTRTCPAYIEDISEIHRTEPYVYSQMIAGKDAPNFGEAKNSWLTGTAAWTFLDVSQYILGIRPDYDGLIIDPCIPDTMDGFTAKRKFRGNTYHITVRNPAHVQKGVTKLIVDGAAIDGNMIPAINGTGHDVTVEVTMG

SEQ ID NO: 78 - protein, 814 aa, Prevotella buccae
MADKRYGHFDDEHREYVITDPKTPWPWINYLGNEDFFSLISNTAGGYSFYKDAKFRRLTRYRYNSVPMDNGGRYFYLKDGDTIWNPGWKPCKTPLDFYECRHGMNYTRITGRKNAVEASVLFFVPLHTWGEVQKLTLQNLGTETKTLKLFSFQEWCLWNAATDMENFQRNFSTGEVEVEGSVIYHKTEYRERRNHYAFYSVNASIDGYDTDRETFVGLYNEFAEPEAVVEGRARNSFAHGWSPIASHYIEVTLAPGESRDFVFLLGYVENAPEEKFAGKQTINKEKALRMIADFDTTAKVDRAFDELKTYWDSLLSVFTLKSGNAKLDRMVNIWNQYQCMITFCMSRSASFFESGIGRGMGFRDSNQDLVGFVHQIPERARARIIDIASTQFPDGGCYHQYQPLSKRGNNDIGGGFNDDPCWLIFGTVAYIKETGDFSILDEMVPFDNQPGSEVTLFEHLKVSMNHVLNNLGPHGLPLIGRADWNDCLNLNCFSWDPNESFQTTENKSEGSKAESLMIAGLFVVTGKDYVELCRHLGKHEEAERMAQAVSDMEEAVKKHGWDGNWFLRAYDFFGNKIGSHENEEGKIFIESQGWCTMAGIGLEDGFVDKALDSVKERMECEHGIVLNNPAYTTYHVEMGELSSYPEGYKENAGIFCHNNPWVIIGETVAGRGDDAWSHYTKILPSYVEEKYQTLHKVEPYVNCQMVAGKDAARPGEGKNSWLTGTAVWMWYTVSEFILGIKPSYDGLTIDPCLPTSAKEYEVCRKFRGAEYIIKVKNPKGVNKGVRSLLLDGQRMEGNTVPFSEGRHTVEVVMG

SEQ ID NO: 79 - protein, 814 aa, Prevotella buccae
MADKRYGHFDDEHREYVITDPKTPWPWINYLGNEDFFSLISNTAGGYSFYKDAKFRRLTRYRYNSVPMDNGGRYFYLKDGDTIWNPGWKPCKTPLDFYECRHGMNYTRITGRKNAVEASVLFFVPLHTWGEVQKLTLQNLGTETKTLKLFSFQEWCLWNAATDMENFQRNFSTGEVEVEGSVIYHKTEYRERRNHHAFYSVNASIDGYDTDRETFVGLYNEFAEPEAVVEGRARNSFAHGWSPIASHYIEVTLAPGESRDFVFLLGYVENAPEEKFAGKQTINKEKALRMIADFDTTAKVDRAFDELKAYWDSLLSVFTLKSGNAKLDRMVNIWNQYQCMITFCMSRSASFFESGIGRGMGFRDSNQDLVGFVHQIPERARARIIDIASTQFPDGGCYHQYQPLSKRGNNDIGGGFNDDPCWLIFGTVAYIKETGDFSILDEMVPFDNQPGSEVTLFEHLKVSMNHVLNNLGPHRLPLIGRADWNDCLNLNCFSWDPNESFQTTENKSEGSKAESLMIAGLFVVTGKDYVELCRHLGKHEEAERMAQAVSDMEEAVKKHGWDGNWFLRAYDFFGNKIGSHENEEGKIFIESQGWCTMAGIGLEDGFVDKALDSVKERMECEHGIVLNNPAYTTYHVEMGELSSYPEGYKENAGIFCHNNPWVIIGETVAGRGDDAWSHYTKILPSYVEEKYQTLHKVEPYVNCQMVAGKDAARPGEGKNSWLTGTAAWMWYTVSEFILGIKPSYDGLTIDPCLPTSAKEYEVCRKFRGAEYIIKVKNPKGVNKGVRSLLLDGQRMEGNTVPFSKGRHTLEVVMG

SEQ ID NO: 80 - protein, 821 aa, Roseburia hominis
MKFGYFDDAKKEYVITSPRTPLPWINYLGSKDFFSLISNTCGGYSFYKDAKLLRLTRYRYNNVPFDSNGHYYYIKEGDTIWNPGWMPTKTELDSYECHHGMGYSTFRSSKNDLSAELTAFVPVDDSCEINKLTLTNNGSAPKTFSVFSYVEFCLWNAMDDMTNFQRNFSTGEVEVHGSAIYHKTEYRERRNHYALYAVNAPIAGFDTDRDSFLGAYGENSAPEVVVTGASKDSMASGWAPVGSHHLSVSLAPGESKTFVFVLAYIENPIDQKWVGRPEDGVINRAPAEALMARYDTTEKADAALAALKEYWDKLLSHFTISSSEEKLDRMVNVWHQYQCMVTFNMSRSASYFESGIGRGMGFRDSCQDLLGFVHLIPDRARERILDIAATQFEDGSAYHQYQPLTKKGNSDIGSGFNDDPLWLIAGAAAYIKETGDYTILDEMTPYDSDPSKATDFMEHLRRSFHYTMEHLGPHGLPLIGRADWNDCLNLNCFSTEPGESFQTFGPSEGPNAESVFIAGMFVRYGKDYAAICRHRGMDDEAAVAEKAIADMEKTVLDAGWDGEWFLRAYDHYKNKVGSKECEEGKIFIEPQGFCVMAEIGLKEGNCLKAMQSVEKYLDTKYGIVLLQPAYHRYHVELGEISSYPPGYKENAGIFCHNNPWISIAETVVGRGSRAWQVYTRTCPAYIEDISEIHRTEPYVYSQMIAGKDARNFGEAKNSWLTGTAAWTFLDVSQYILGIRPDYDGLVIDPCIPSSLDDFTARRDFRGTTYHVTVKNPNHVEKGVISMTVDGKDVDVSGISGGMIPIALADGKKDVNVEVVMG

SEQ ID NO: 81 - protein, 831 aa, Prevotella copri
MAEKKYGHFDDANREYVITDPKTPWPWINYLGNEDFFSLISNTAGGYSFYKDAKFRRITRYRYNGVPMDNGGRYFYIKDGDTVWNPGWKPCKTPLDSYECRHGMNYTRITGSKNGVEASVLFFVPLHTWAEVQKMTLKNQTEEEKTLKVFSFAEWCLWNAATDMENFQRNFSTGEVEVEGSTIYHKTEYRERRNHYAFYTVNTEIQGYDTDRESFIGLYNEFAEPEAVMEGKPRNSFAHGWSPIASHYIEVTLQPGESRDLIFLLGYVENEQDKKFSAKKVINKEKAHQLIAKFDTTEKVDAAFAELNQYWDNLLNIFTVKSGNDKLDRMVNIWNQYQCMITFCMSRSASFFESGIGRGMGFRDSNQDLVGFVHQIPTRARQRIIDIASTQFPDGGCYHQYQPLTKRGNNDIGGGFNDDPCWLIFGTVAYIKETGDFSILAEQVPFDNQPGTEVSLFEHLKISMNHVINNLGPHKLPLIGRADWNDCLNLNCFSWDPNESFQTTENKGEGSKAESLMIAGLFVVTGKDYVALCKQLAKEAMESKEGEIAGLAEEDYLTEAERMQQAVDEMNEAVKQHGWDGEWFLRAYDFFGNKIGSDENEEGKIFIESQGWCTMAGIGLEEGLCDIALDSSKKRLECEHGLVLNNPAYTTYHVEMGEISSYPEGYKENAGIFCHNNPWVIIGETVAGRGNDAWSHYTKILPSYVEEKYQTLHKVEPYVNCQMVAGKDAAKPGEGKNSWLTGTAAWMWYTVSEFILGIKPDYEGLLIDPCLPSTAKEYEVTRKFRGGEYHITVKNPSGNQKGVKQITVDGTPISGTIIPCSQGKHEVVVEM

SEQ ID NO: 82 - protein, 814 aa, Roseburia inulinivorans
MKFGYFDDNAKEYVITSPKTPLPWINYLGCEDFFSLVSNTCGGYSFYKDAKLLRLTRYRYNNVPGDSNGHYYYIKEGNTIWNPGWMPTKTDLDSYECHHGIGYSIFKGNKNDLAAELTDFVPIGSTCEINKLTMTNHSKEEKHFSIFSYVEFCLWNAMDDMTNFQRNYSIGEVEIHGSAIYHKTEYRERRNHYAVYSVNAPIAGFDTSRDAFLGAYGENSAPDVVVSGSCKNSVASGWAPVGSHQLDVTLAPGESRTYVFVLGYVENLAAEKWVGRPEDGIINRTPAEKLLEKFNTTEKADQALADLKAYWEKLLSHFTVSSKEEKLDRMVNIWHQYQCMVTFNMSRSASYYESGIGRGMGFRDSCQDLLGFVHLIPDRARQRILDIASTQFEDGSAYHQYQPLTKKGNSDIGSGFNDDPLWLIAGTAAYIKETGDYSILDERTPYDNDDSKATDLMEHLRRSFHYTMEHRGPHKLPLIGRADWNDCLNLNCFSTEPGESFQTFGPSEGPNAESVFIAGMFVRYGKDYVEICRHRGMAEEAALAEEAIADMEKTVLDAGWDGEWFLRAYDHYKNKIGSKECEDGKIYIEPQGFCVMAEIGLKEGNCLKAMESVEKYLDTKYGIVLLQPPYHRYHVELGEISSYPPGYKENAGIFCHNNPWISIAETVVGRGNRAWQVYTRTCPAYIEDISEIHRTEPYVYSQMIAGKDAPNFGEAKNSWLTGTAAWTFLNASQYILGIRPDYDGLIVDPCIPSFMDGFTAKRDFRGTTYHIEVENPNHVEKGIASVTVDGNAIEGNLIPVDASKKEVHVKIIMG

SEQ ID NO: 83 - protein, 811 aa, Butyrivibrio fibrisolvens
MKYGFFDDNNKEYVITTPKTPLPWINYLGCKDFFTLLSNTCGGYTFYKDAKLLRMTRYRYNDTTPDTNGKYFYIKDGDTIWNPGWQPTKTELDSYECRHGIGYSKFTGTKNDVEAALVTFVPVNDSVELTKVTLTNKGTAKKDIQLFSYVEWCLWNADDDMKNFQRNLSIGEVEVVDSTIYHKTEYRERRNHYAVYSVNSKIDGFETSRDEFRGAYNGPDKPAAVIEGKLHNTIASGWYPIASHQINVSLNPGESKTFVFALGYIENAEDDKWEAPSVINKKKATALLSKYQTVEAFDSALAELCSYWDGLLAKFHIESKDEHVNRMVNIWNQYQCMVTFNMSRSASYYESGIGRGMGFRDSCQDLLGFVHLIPDRARERIIDIASTQFQDGSAYHQYQPLTKKGNSDIGSGFNDDPLWLIAGTSAYIRETGDTSILNETVPYDNDMSVATSLMEHLKRSFDYIVNHKGPHDLPLIGRADWNDCLNLNCFSEHPGESFQCFGPSEGPVAESVFIAGMFVKYGREYADLCKLMGDNAEADRALAEVDKMIKAIEKDGWDGEWFVRAYDAYSHKVGSKECEEGQIYIEPQGMCVMAGVGIDDGNAVKALNSVKEKLDTKYGVMILQPAYTRYHLELGEISSYPPGYKENAGIFCHNNPWISIAETCIGRGDRAFEVYKKTCPSYIEDISEIHRTEPYVYSQMVAGADAKFHGEAKNSWLTGTAAWTFTNISQYILGIYPTLEGLSVNPCTPAEFGDFNVTRVYRGVTYNIEIKNPNKVQKGVASLLVDGKEVEGNIIPFDGSKKTVSVVATMK

SEQ ID NO: 84 - protein, 813 aa, Prevotella bryantii
MENKRYGHFDDDNREYVITDPKTPWPWINYLGNDDFFSLISNTAGGYSFYKDAKFRRITRYRYNDVPMDNNGRYFYIKDGDTIWNPGWKPCKTPLDSYECRHGMNYTRIIGSKNGIEANVLFFVPLHTWAEVQKMTITNKNNTTKSLKLFSFEEWCLWNASTDMENFQRNFSTGEVEIEGSTIYHKTEYRERRNHFAFYHVNVPIQGFDTDRESFVGLYNEYAEPQAVIDGKPMNSFAHGWSPIASHYIEITLQPGESQDLIFILGYVENEQDKKWAGYQTINKEKAHELIALYDTTEKVDTAFADLKRYWDKLLNIYRVESGNEKLDRMVNIWNQYQCMITFCMSRSASFFESGIGRGMGFRDSNQDLVGFVHQIPERARQRIIDIASTQFPDGGCYHQYQPLTKRGNNDIGGGFNDDPCWLIFGTVAYIKETGDFSILDEQVPFDNTPGTEVSLFEHLRISLHHVINHLGPHKLPLIGRADWNDCLNLNCFSYDPNESFQTTENKNEGSQAESVMIAGLFVVTGRDYVELCKAIGKSDEAERMQIAVDKMVQAIKKYGWDGEWFLRAYDFYGNKIGSNENEEGKIFIESQGWCTMAGIGIEDGLCDKALDAVKEYMECEHGIVLNHPAFTTYHVEMGEISSYPEGYKENAGIFCHNNPWIIIGETVDGRGDDAWSHYTKILPSYVEEKYQTLHKVEPYVNCQMVAGKDAFRPGEGKNSWLTGTAAWMWYTISQFILGIKPDYNGLLIDPCLPKTAKEYTVYRKFREAEYTIHISNMDGNNKGVKQISVDGKAIKGNLVPYAAGKHTIEVYM

SEQ ID NO: 85 - protein, 811 aa, Eubacterium cellulosolvens
MKFGHFDDAAKEYVIETPRTPLPWINYLGSQDFFSLISNTAGGYSFYKDAKLMRITRYRYNNCPLDAGGRYYYIKDGDTVWNPGWQPTQTELDSYSCRHGLGYTIITGSKNNIEATLQAFVPVNDKCEVNRIILKNNGTEDKHLDLFSFLEFCLWNAQDDSTNFQRNFSTGEVEVIGSTIYHKTEYRERRNHYAVYSVNKKIDGFDTSRHKFIGMYNGFHNPEAVLAGESRNSIARGWQPIGSHHLKVDLKPGESQSFIFVLGYCENPKDEKWEAPNVINKKPANELLAQFQTDEQVDAKFQELKDYWNGLLTTYTVHTEDEKLNRLVNIWNQYQCMVTFNMSRSASYFESGMGRGMGFRDSCQDLLGFVHLIPARARERIIDIANTQFEDGSTYHQYQPLTKKGNADIGGGFNDDPLWLIAGTCAYIRETGDFSILDEMCAFDSDFSKAVPLMDHLRRSFNYTLTHRGPHNLPLIGRADWNDCLNLNCFSEEPGESFQTFGPSEGPVAESVFIAGMFVKYGNEYADLCEATGLNDEAAKVRAAVADMNEAINGAGWDGEWFVRAYDAYSNPIGSDKNEEGKIYIEPQGMCVMAGVGVDNGKAEKALKSVEERLDTKFGIVLNQPAYTKYHVELGEISSYPPGYKENAGIFCHNNPWIACAETVVGHGNRAFEVFKKTCPIYLEDIGEIHKTEPYVYCQMVAGRDAEIPGEGKNSWLTGTAAWTFTTMSQYILGCQPTFAGLCINPCIPDTLEGYKLDRTFRGVRYHITIDNKAHVQKGVKSMTVDGVAVEGNVITPVTDKTDVDVVVTMG

SEQ ID NO: 86 - protein, 813 aa, Prevotella ruminicola
MEQQKRYGHFDDQHREYVITDPQTPWPWINYLGNEDFFSLISNTAGGYSFYKDAKFRRITRYRYNNVPMDNGGRYFYIKDGDTVWNPGWKPCKTPLDFYECRHGMSYTRVTGRKNGVEASVLFFVPLKKWAEVQKLTLTNQSNEVKNLKLFSFEEWCLWNAATDMENFQRNFSTGEVEIEGSTIYHKTEYRERRNHYAFYHVNTPIQGFDTDRETFVGLYNEFADPQVVIEGKPRNSHAHGWSPIASHYIEVTLQPGESKDFVFLLGYIENEQDKKFSAPQVINKDKAHALIAELDTTEKVDKAFAELCEYWDALLNIYNVRTGNDKLDRMVNIWNQYQCMVTFNFSRSASFFESGIGRGMGFRDSNQDLVGFVHQIPSRARQRIIDIASTQFPDGGCYHQYQPLTKRGNNDIGGGFNDDPCWLIFGTVAYIKETGDFSILDEMVPFDNQPGSEVTLFEHLKISMDHVINNLGPHMLPLIGRADWNDCLNLNCFSWDPNESFQTTENVSEGTKAESLMIAGLFVVTGKDYVALCQKLGKTQEAERMQKAIDAMIEAVKKHGWDGEWYLRAYDFYGNKIGSNECDEAKIFIESQGWCTMAEIGAQEGMVAKSLDSCKKYLECEHGMVLNNPAFTKYIYEYGEISSYPEGYKENAGIFCHNNPWVIIGECLAGRGNDAWSHYAKILPSYVEEKYQTLHKVEPYVNCQMVAGKDAFKPGEGKNSWLTGTAAWMWYTVSEFILGIKPDYDGIRIDPCLPQTATDYTVQRKFRDAEYEITIHPNGAQKGVKAITLDGQPVDGTVIPYSAGKHVVEVTM

SEQ ID NO: 87 - protein, 842 aa, Cellvibrio Gilvus; identical to SEQ ID NO: 11

SEQ ID NO: 88 - protein, 822 aa, Cellulomonas fimi
MRYGHFDDAAREYVITTPHTPYPWINYLGSEQFFSLLSHQAGGYSFYRDAKMRRLTRYRYNNIPADAGGRYLYVNDGGDVWTPSWLPVKADLDHFEARHGLGYSRITGERNGLKVETLFFVPLGENAEVQKVTVTNTSDAPKTATLFSFVEFCLWNAQDDQTNYQRNLSIGEVEVEQDGPHGSAIYHKTEYRERRDHYAVFGVNTRADGFDTDRDTFVGAYNSLGEASVPRAGKSADSVASGWYPIGSHSVAVTLQPGESRDLVYVLGYLENPDEEKWADDAHQVVNKAPAHALLGRFATSEQVDAALEALNSYWTNLLSTYSVSSTDEKLDRMVNIWNQYQCMVTFNMSRSASFFETGIGRGMGFRDSNQDLLGFVHLIPERARERIIDIASTQFADGSAYHQYQPLTKRGNNDIGSGFNDDPLWLIAGVAAYIKESGDWGILDEPVPFDNEPGSEVPLFEHLTRSFQFTVQNRGPHGLPLIGRADWNDCLNLNCFSTTPGESFQTTENQAGGVAESVFIAAQFVLYGAEYATLAERRGLADVATEARKYVDEVRAAVLEHGWDGQWFLRAYDYYGNPVGTDAKPEGKIWIEPQGFAVMAGIGVGEGPDDADAPAVKALDSVNEMLGTPHGLVLQYPAYTTYQIELGEVSTYPPGYKENGGIFCHNNPWVIIAETVVGRGAQAFDYYKRITPAYREDISDTHKLEPYVYAQMIAGKEAVRAGEAKNSWLTGTAAWNFVAVSQYLLGVRPDYDGLVVDPQIGPDVPSYTVTRVARGATYEITVTNSGAPGARASLTVDGAPVDGRTVPYAPAGSTVRVEVTV

SEQ ID NO: 89 - protein, 842 aa, Cellvibrio Gilvus
MGSSHHHHHHSSGLVPRGSHMRYGHFDDAAREYVITTPHTPYPWINYLGSEQFFSLLSHQAGGYSFYRDAKMRRLTRYRYNNIPADAGGRYLYVNDGGDVWTPSWLPVKADLDHFEARHGLGYSRITGERNGLKVETLFFVPLGENAEVQKVTVTNTSDAPKTATLFSFVEFCLWNAQDDQTNYQRNLSIGEVEVEQDGPHGSAIYHKTEYRERRDHYAVFGVNTRADGFDTDRDTFVGAYNSLGEASVPRAGKSADSVASGWYPIGSHSVAVTLQPGESRDLVYVLGYLENPDEEKWADDAHQVVNKAPAHALLGRFATSEQVDAALEALNSYWTNLLSTYSVSSTDEKLDRMVNIWNQYQCMVTFNMSRSASFFETGIGRGMGFRDSNQDLLGFVHLIPERARERIIDIASTQFADGSAYHQYQPLTKRGNNDIGSGFNDDPLWLIAGVAAYIKESGDWGILDEPVPFDNEPGSEVPLFEHLTRSFQFTVQNRGPHGLPLIGRADWNDCLNLNCFSTTPGESFQTTENQAGGVAESVFIAAQFVLYGAEYATLAERRGLADVATEARKYVDEVRAAVLEHGWDGQWFLRAYDYYGNPVGTDAKPEGKIWIEPQGFAVMAGIGVGEGPDDADAPAVKALDSVNEMLGTPHGLVLQYPAYTTYQIELGEVSTYPPGYKENGGIFCNNNPWVIIAETVVGRGAQAFDYYKRITPAYREDISDTHKLEPYVYAQMIAGKEAVRAGEAKNSWLTGTAAWNFVAVSQYLLGVRPDYDGLVVDPQIGPDVPSYTVTRVARGATYEITVTNSGAPGARASLTVDGAPVDGRTVPYAPAGSTVRVEVTV

SEQ ID NO: 90 - protein, 842 aa, Cellvibrio Gilvus
MGSSHHHHHHSSGLVPRGSHMRYGHFDDAAREYVITTPHTPYPWINYLGSEQFFSLLSHQAGGYSFYRDAKMRRLTRYRYNNIPADAGGRYLYVNDGGDVWTPSWLPVKADLDHFEARHGLGYSRITGERNGLKVETLFFVPLGENAEVQKVTVTNTSDAPKTATLFSFVEFCLWNAQDDQTNYQRNLSIGEVEVEQDGPHGSAIYHKTEYRERRDHYAVFGVNTRADGFDTDRDTFVGAYNSLGEASVPRAGKSADSVASGWYPIGSHSVAVTLQPGESRDLVYVLGYLENPDEEKWADDAHQVVNKAPAHALLGRFATSEQVDAALEALNSYWTNLLSTYSVSSTDEKLDRMVNIWNQYQCMVTFNMSRSASFFETGIGRGMGFRDSNQDLLGFVHLIPERARERIIDIASTQFADGSAYHQYQPLTKRGNNDIGSGFNDDPLWLIAGVAAYIKESGDWGILDEPVPFDNEPGSEVPLFEHLTRSFQFTVQNRGPHGLPLIGRADFNDCLNLNCFSTTPGESFQTTENQAGGVAESVFIAAQFVLYGAEYATLAERRGLADVATEARKYVDEVRAAVLEHGWDGQWFLRAYDYYGNPVGTDAKPEGKIWIEPQGFAVMAGIGVGEGPDDADAPAVKALDSVNEMLGTPHGLVLQYPAYTTYQIELGEVSTYPPGYKENGGIFCHNNPWVIIAETVVGRGAQAFDYYKRITPAYREDISDTHKLEPYVYAQMIAGKEAVRAGEAKNSWLTGTAAWNFVAVSQYLLGVRPDYDGLVVDPQIGPDVPSYTVTRVARGATYEITVTNSGAPGARASLTVDGAPVDGRTVPYAPAGSTVRVEVTV

SEQ ID NO: 91 - protein, 814 aa, Roseburia inulinivorans; identical to SEQ ID NO: 82

SEQ ID NO: 92 - protein, 831 aa, Prevotella copri; identical to SEQ ID NO: 81

SEQ ID NO: 93 - protein, 811 aa, Faecalibacterium prausnitzii
MKFGYFDDQNKEYVITTPQTPLPWINYLGSEDFFSLVSNTAGGYSFYRDARMRRLTRYRYNNSPLDMDGHRIYIKDGETVWNPGWQPTKTPLDSYSCRHGLGYTILEGKKDGVTARQELFVPKGDACELDRVTVCNGSTVVKELDLFSYVEFCLWDAVDDGSNFQRNYSTGEVEVEGSVIYHKTEYRERRNHYAVFWANCPVDSFDTTRDAFCGVYGGPADPQAVRAGHCSGSIAHGWAPVGALHIHLTLAPGESHSILFGLGYIENPQQEKFIAPGVINKTRAHAMMERYATDAQVDAARAALRTHWEQLLSTYHLESGEEKLNRMVNIWHQYQCMVTFNMSRSASYYESGTGRGMGFRDSCQDLLGFVHIIPSRARERILDIAATQFEDGSAYHQYQPLTKKGNRDIGTGFNDDPLWLIAGTAAYLRETGDWSILEEQVPFDNDATKAQTLMEHLRRSFNFTCTHLGPHGLPLIGRADWNDCLNLNCFSEHPGESFQITGPSEGPVAESVFIAGMFVKYGHEYAQLCDHLNLTEEAAAARKHIDAVEQATLTAGWDGAWFRRAYDAFGKPVGSKECTEGQIFIEPQGMCVMAGIGKESGQAAQALASVEERLDTKYGVVLLQPAYTSYQLNLGEISSYPPGYKENAGIFCHNNPWISCAEATLGHGDRAFAVYRKTCPAYIEDISEIHRTEPYVYSQMVAGKDAPTFGEAKNSWLTGTAAWTFFNISQYILGIQPTLDGLKVDPCIPHTLSGFTVTRRFRGAVYHITVDNAAGVQHGIKAVTVDGKAISGNVLPLAAAGTEVTVQVTMG

SEQ ID NO: 94 - protein, 833 aa, Eubacterium siraeum; identical to SEQ ID NO: 47

SEQ ID NO: 95 - protein, 599 aa, Paenibacillus polymyxa
MGLYNGLDQPQTITAGQASNSIASGWSPIGSHCIEITLEPGEETSCNFVLGYVENPEEEKWESPGIINKKRAHAMIAQFADETDVERALSELRSYWNDLLSKYTLQSHDDKLNRMVNIWNPYQCMVTFNLSRSASYFESGIGRGMGFRDSNQDLLGFVHQIPERARERIIDIASTQFENGGAYHQYQPLTKKGNHEVGGGFNDDPLWLIVGTSAYIKETGDFGILDEQVPFDGNVDRASSLFEHLKRSFYHVVDNLGPHGLPLIGRADWNDCLNLNCFSATPDESYQTTQNLEGRIAESVFIAGLFVYTGPDFIELCKRRGLNEEAATAQAHVDRMRTATLEHGFDGEWFLRAYDHYGNKIGSKDCEEGQIFIEPQGFCVMAGIGVEEGLAHKALDSTRDRLETPYGIVLQHPPYSRYYMNLGEISSYPPGYKENAGIFCHNNPWIMMAEAVIGRGDRAFELYSKIAPAYLEDISDIHRTEPYVYAQMIAGKDAVREGEAKNSWLTGTAAWNFIAITQSILGIQPEWDGLRIDPCIPKSWGEFTVTRVFRGDTYVIHITNPQHVSKGVATVTVDGTVLTNNILPVAGDGTIHQVKVLLG

SEQ ID NO: 96 - protein, 811 aa, Clostridium thermocellum; identical to SEQ ID NO: 25

SEQ ID NO: 97 - protein, 826 aa, Faecalibacterium prausnitzii
MISAFPVYPIRRNKAMRFGHFDDARREYVIDTPRTPLPWINYLGSEDFFSLVSNTGGGYSFYRDARLRRLTRYRYNNSPLDMDGHRIYINDGGTIWNPGWQPAKTELDRYTCRHGLGYTILQGEKNGIAAAQELFVPRGDACEIDRLTLENKTAAPRTLDVFSYVEFCLWDAMDDSSNFQRNFSTGEVEVVESAIYHKTEYRERRDHYAVFWANAPVTSFDTSRDAFCGVYGGPVAPEAVKAGHCSNSIAHGWAPVGAHHFHLTLAPGEKKSIIFGLGYIENPVREKFSAPGIINKARAEAMMARYATDAQVDAARRALADYWQELLSGWQLTSGEEKLDRMVSLWNQYQCMVTFNMSRSASYYESGIGRGMGFRDSCQDLLGFVHMIPSRARERILDIAATQFEDGSAYHQYQPLTKKGNSDVGSGFNDDPLWLIACTAAYLRETGDWSILDEPVAFDNDVTRAQPLMEHLRRSFRYTHTHLGPHGLPLIGRADWNDCLNLNCFSEHPGESFQITGPSEGPVAESVFIAGMFVKYGREYAELCDHLHLTEEAASARTAIDAVEQATLTAGWDGAWFRRAYDAFGAPVGSRECDEGQIFIEPQGICVMAGIGRETGQAEAALKSVEERLDTPYGVVLLQPAYTTYRLNLGEISSYPPGYKENAGIFCHNNPWISCAETVLGHGDRAFAVYKKTCPAYIEDISEIHRTEPYVYSQMVAGRDAPTFGEAKNSWLTGTAAWTFVNVSQYILGIQPTLDGLRVDPCIPHTLAGYTVTRRYRGAVYHIRVENPHAVQKGVQSVTVNGAPIAGTLLPLAKAGESVEVSVILG

SEQ ID NO: 98 - protein, 821 aa, Roseburia intestinalis; identical to SEQ ID NO: 71

SEQ ID NO: 99 - protein, 814 aa, Prevotella buccae; identical to SEQ ID NO: 79

SEQ ID NO: 100 - protein, 811 aa, Caldicellulosiruptor lactoaceticus; identical to SEQ ID NO: 37

SEQ ID NO: 101 - protein, 424 aa, Bifidobacterium adolescentis
MRYGHFDDAAKEYVIETPATPLPWINYLGNEDFFSLISNTGGGYSFYKDAKLRRITRYRYNNVPADNGSRCYYLSLMDSDSADAKPVETWSPTFLPCKTPLDSYKCRQGIGYTVFEASKRGIESKLTAFVPLHTNAEINRLDVTNTTDEPAVIDVTGSVEWCLWNAADDSSNFQRNLSTGEVEIERETDATPLYHKTEFKERRNHYAFYGVNAPVVGFDTSRDEFLGQFNGWDTPQVIAEGKAHDSVAHGWFPIAANRVRLELQPDETASLVFMLGYIEVAKDQKWEDPNDPAKVGIINKKPAHELFRRFATVEQVEAALKELNSYWSELLTTYSVDSGDEKLDRMVNIWHQYQCMVTFNMSRSASYYESGMGRGMGFRDSNQDLLGFVHLIPERARERIIDIASTQMEDGSAWHSAHRPRRLE

SEQ ID NO: 102 - protein, 809 aa, Lachnospiraceae bacterium
MKYGFFDDQRCEYVITTPETPLPWINYLGCKDFFTLISNTCGGYSFYKDAKLLRLTRYRYNNVPYDNNGQYFYIKDGSSIWNPGWQPSQTRLDSYECRHGLGYSRFTGSLNQAKAEVLTFVPLNDTCQVTSLTLTNESGETKNLSLFSYVEWCLWNADDDMKNFQRNLSTGELEIEGSTIYHKTEYRERRNHYALYSVNTPVDGFDTSRDAFLGTYGSPAAPVVVKEGKASNSEAHGWSPIASHQINVSLAPGESRSYIFVLGYVENEEEEKWEAPGIINKTKAHQLLSRYQSDEAVEKAFTELTDYWQELLSGYQVSSDCEEVNRMVNIWNQYQCMVTFNMSRSASYYESGIGRGMGFRDSCQDLLGFVHLIPERARERILDIASAQFGDGSTYHQYQPLTKKGNADIGGGFNDDPLWLIAGTSAYIKETGDTSILSEVVTFDDGGEGTLFEHLTRSFEFTVTHKGPHGLPLIGRADWNDCLNLNCFSAQPGESFQTFGPSEGPVAESVFIGGMFVKYGEEYAQLAELQGLTDIAESARREVSSMYDTLLDAGWDGDWFLRAYDAYSQKVGSSECEEGQIFIEPQGFCVLAGVGIKEGKAQRALDSVKERLDTKYGIMLLQPAYTRYHLELGEITSYPPGYKENAGIFCHNNPWISIAEAVIGRGERAFEVYRKTCPAFLQDISEIHRTEPYCYSQMIAGRDAATHGEAKNSWLTGTAAWTFVNISQYILGIQPSLTGLCIDPCVPGDFGDFTITRRFRGAVYHIEVKNPNHLEKGVSSLLVDGEKVDGNVVPFVEGKKEYHVTAVMG

SEQ ID NO: 103 - protein, 557 aa, Roseburia intestinalis
YVFVLGYVENPVEEKWVGRAEDGVINRKRADELLSRFDTAEKADAALVKLKDYWNELLSHFTISSSEEKLDRMVNIWHQYQCMVTFNMSRSASYFESGIGRGMGFRDSCQDLLGFVHLIPDRARERILDIAATQFEDGSAYHQYQPLTKKGNSDIGSGFNDDPLWLIAGTAAYIKETGDYSILDEMTPYDSDASKATTFMEHLRRSFHYTMEHLGPHNLPLIGRADWNDCLNLNCFSTEPGESFQTFGPSEGPNAESVFIAGMFVRYGKDYAAICRHQGMTEEAELAEKAIAEMEKTVMDAGWDGEWYLRAYDHYKNKIGSKECEDGKIFIEPQGFCVMAEIGLEEGCCLKAMESVEKYLDTKYGIVLLQPPYHRYHVELGEISSYPPGYKENAGIFCHNNPWISIAETVIGRGNRAWQVYTRTCPAYIEDISEIHRTEPYVYSQMIAGKDAPNFGEAKNSWLTGTAAWTFLNVSQFILGIRPDYDGLTVDPCIPSKLDGFTAKRDFRGVSYHITVKNPNHVEKGVLSMIVDGQPVEGTTIPFSAEKKDVNVEVTMG

SEQ ID NO: 104 - protein, 813 aa, Prevotella bryantii; identical to SEQ ID NO: 84

SEQ ID NO: 105 - protein, 807 aa, Clostridium thermocellum; identical to SEQ ID NO: 26

SEQ ID NO: 106 - protein, 811 aa, Acetivibrio cellulolyticus; identical to SEQ ID NO: 27

SEQ ID NO: 107 - protein, 689 aa, Marvinbryantia formatexigens
MDAACEINHLKLKNTSSAKKQISLFSYVEFCLWNAIDDMNNFQRNLSIGEVEIEGSTIYHKTEYRERRNHYSFFSVNVPVDGFDTSRDVFLGAGNGNAIPDAVREKKCRGSVASGWYPIASHQINLSLAPGEEKEFVFVLGYCENPEEEKWESPGVIRKDGAHALLARFATPRQAEAAFAQLNEYWDGLLSRFTVESGNEHVNRMVNIWNQYQCMVTFNMSRSASYYESGTGRGMGFRDSCQDLLGFVHLIPERARERILDIAATQFEDGSAYHQYQPLTKKGNLDIGSGFNDDPLWLIAAVAAYLKETGDFSILDEVVPFDNRPELAQPLLEHLYRSFRYTCTHLGPHKLPLIGRADWNDCLNLNCFSKEPGEPFQTTGPSEGPVAESVFIAGMFVKYGREFAEICHQTGRTDYEEEALRATEQMYQSVLDAGWDGEWFLRAYDASSEKIGSKECREGQIYIEPQGFCVMAGIGVEEGLAEKALDSVKERLDTKYGIMILQPAYTQYYLNLGEISSYPPGYKENAGIFCHNNPWISIAETVIGRGDRAFEIYEKTCPSCIEHISEIHRTEPYVYSQMIAGADAFYHGEAKNSWLTGTAAWTFVNISQAILGVQPDYDGLRIDPCVPSSFGSFRLIRKFRGSTYYIDVENPDGVQKGVSGISVDGKEIAGNLIPVEAGKTEYHVTVRMG

SEQ ID NO: 108 - protein, 813 aa, Thermotoga neapolitana; identical to SEQ ID NO: 35

SEQ ID NO: 109 - protein, 828 aa, Bacteroides; identical to SEQ ID NO: 74

SEQ ID NO: 110 - protein, 827 aa, Clostridium; identical to SEQ ID NO: 69

SEQ ID NO: 111 - protein, 828 aa, Bacteroides uniformis; identical to SEQ ID NO: 74

SEQ ID NO: 112 - protein, 827 aa, Ruminococcus albus; identical to SEQ ID NO: 65

SEQ ID NO: 113 - protein, 811 aa, Clostridium stercorarium; identical to SEQ ID NO: 46

SEQ ID NO: 114 - protein, 827 aa, Coprococcus; identical to SEQ ID NO: 68

SEQ ID NO: 115 - protein, 848 aa, Prevotella dentalis
MQHHLDMKSYGHFDDEHREYVITNPKTPFPWINYLGTTDFFGLVSNTGGGYDFYKDAKYRRITRYRYNGVPMDSGGRYFYINDGGTVWNPGWKPCKTPLDSYECRHGMNYTRITGARRGIEASVLFFVPLGTQAEVQKLTLCNTTGAVRRLKLFSLAEWCLWNAATDMENFQRNWSTGEVEVYTQGEDQGQPHTVVYHKTEYKERRNHYAYYALTNAQAQGFDTDRETFVGMYNGFENPQCVEAGRPANSVAHGWSPVASHYVEVELMPGERRDLIFVLGYAENEQACKFEPEDAPRHGLVTSLGEADRTIINKEKAQSVIARFATAEAVDAAFAELGAYWQRILRSFAVHGVRFGNAADNARLERMVNIWNPYQCMITFCFSRSASFFESGVGRGMGFRDSNQDLVGFVHQVPSRARQRIIDIASTQFADGGCYHQYQPLTKRGNNDIGGGFNDDPCWLIFGTVAYVKETGDYSILDELVPWDNEPGTEVTLMEHLRISFNHVVEHLGPHMLPLIGRADWNDCLNLNCFSWDPNESFQTTENNAEGSQAESLMIAGLFVVTGKDYVALCRQTGMDAEARRAEQCVDAMVEAVKRHGWDGDWYLRAYDFYGNKIGSRTCEEGKIFIESQGFCAMAGIGMEEGMVGRALDSCKQWLDSEHGMVLNWPAYTTYHVEMGEISSYPVGYKENGGIFCHNNPWVVIAETVAGRGNDAWAHYKKIAPAWIENQELHKVEPYVYCQMVAGKESARPGEGKNSWLTGTAAWNWIAVTQAILGVKPAYDGIEIDPCIPADLKEYHVHREFRDSVFEITVLNPDGRQHGVRSLVVDGKPQEGTIVKAGPGRHEVVATL

SEQ ID NO: 116 - protein, 816 aa, Reinekea blandensis; identical to SEQ ID NO: 62

SEQ ID NO: 117 - protein, 811 aa, Ruminococcus obeum
MKFGHFDDKAKEYVITTPHTPQPWINYLGSNDFFSLISNTCGGYSFYKDAKLLRITRYRYNNIPVDSNGKYYYINDDGVIWNPGTMPSGTETDTYECRHGLGYSRFHSSKNNLEADLLAFVPVDAACEINCLTLKNNSDVAKNVSLFSYVEFCLWNAVDDSTNFQRNLSIGEVEVHGSTIYHKTEYRERRRHYSFFTVNAPVQNFDTSRDEFLGAGNGNAFPEAVRRKKCSNSIASGWYPIAAHQIDLTLAPGEEKTFVFMLGYCENPADNKWEAPNVIRKAPAKALIERFDTAEKAMAAFAELKTYWETLLARFAVTSSNEHVDRMANIWNQYQCMVTFNMSRSASYYESGTGRGMGFRDSCQDLLGFVHLIPERARERIIDIASTQFPDGSAYHQYQPLTKQGNLDVGSGFNDDPLWLIAAVSAYLKETGDYGILDEPVPFDCKKGSEVPLFEHLNKSFHYTATHLGPHKLPLIGRADWNDCLNLNCFSSEPGESFQTTGPSEGPVAESVFIAAMFVQYGKEFKEICLRTGHEDLAKEAESAVADMYQAVLDAGWDGEWFLRAYDSQSAKVGSKECEEGKIYIEPQGFCVMAEIGKEEGLAEKALDSVHKHLETKYGIMILQPAYTRYHLELGEISSYPPGYKENAGIFCHNNPWISIAEAVLGRGDLAFDVYRKICPSYIEEISDVHRTEPYIYSQMVAGADAARFGEAKNSWLTGTAAWTFVNLSQALLGIQPEYDGLAVNPCLPKNFGGLKIKRRYRDAEYYIDIRKPDGVEKGVAWMEVDGKKIAGNQIPLIPGKKEYHVTVQMG

SEQ ID NO: 118 - protein, 811 aa, Clostridium thermocellum; identical to SEQ ID NO: 13

SEQ ID NO: 119 - protein, 822 aa, Cellulomonas flavigena
MRYGHFDDEAREYVVTTPHTPYPWINYLGSEQFFSLLSHQAGGYSFYRDAKMRRLTRYRYNNIPADAGGRYLYVNDGGDVWTPSWLPVKADLDHFEARHGLGYSRITGERGGLRVATTFFVPLGENAEVQRVAVTNTSDAEKTVTLFSFVEFCLWNAQDDQTNYQRNLSIGEVEVEQDGPHGSAIYHKTEYRERRDHYAVFGVNTHADGFDTDRDTFVGAYNSLGEAAVPRAGQSADSVASGWYPIGSHSVRVTLAPGETRDLVYVLGYLENADDEKWADDAHQVVNKEKAHGLLGRFATTEQADAAVEALQVYWTELLSTYSVRSDDEKLDRMVNIWNQYQCMVTFNMSRSASFFETGIGRGMGFRDSNQDLLGFVHLVPDRARERIIDIASTQFEDGSAYHQYQPLTKRGNNDIGSGFNDDPLWLIAGVAGYVKETGDFSILDEPVPFDNEPGSEVPLFEHLTRSFDFTVNHRGPHGLPLIGRADWNDCLNLNCFSTTPGESFQTTENQAGGHAESVFIAAQFVLYGEQYAELAERRGLTEVASQARKVVGEVREAVLEHAWDGRWFLRAYDFYGNPVGTDAKPEGKIWIEPQGFAVMAGIGVGEGPDDTEAPAIQALDAVEEMLGTPHGLVLQYPAYTTYQLELGEVSTYPPGYKENGGIFCHNNPWVIIAETVVGRGDKAFDYYKRITPAYREEISDVHKLEPYVYAQMIAGKEAPRAGEAKNSWLTGTAAWNFVAVSQYLLGVRPDWDGLVVDPQIGPDVPSFTVTRVARGATYEITVTNSGARGSRASIVVDGTPVEGNLVPYAPAGSTVRVEVTV

SEQ ID NO: 120 - protein, 827 aa, Coprococcus eutactus; identical to SEQ ID NO: 70

SEQ ID NO: 121 - protein, 814 aa, Roseburia intestinalis; identical to SEQ ID NO: 72

SEQ ID NO: 122 - protein, 811 aa, Ruminococcus obeum
MKYGYFDDKAKEYVITTPHTPLPWINYLGSNDFFSLISNTCGGYSFYKDAKLMRITRYRYNNIPVDSNGKYYYINDDGVIWNPGTMPSMTETDTYECRHGLGYSRFHSSKNKLEADLLAFVPSDAACEINCLKLKNNSDSEKNISLFSYVEFCLWNAVDDGSNFQRNLSIGEVEVQGSTIYHKTEYRERRRHYSFFTVNTPVHNFDTSRDAFLGAGNGNAFPEAVRKKKCSNSIASGWYPIAAHQIDIKLVPGEEKEFVFVLGYCENPADDKWEAPGIINKTPAKALIERFNTMDKAMAAFAKLNDYWENLLARFAVSSENEHIDRMANIWNQYQCMVTFNMSRSASYYESGTGRGMGFRDSCQDLLGFVHLIPERARERIIDIASTQFPDGSAYHQYQPLTKQGNLDVGSGFNDDPLWLIAAVAAYIKETGDYGILEEQVPFDCKKGSAVPLFEHLDKSFHYTVTHLGPHKLPLIGRADWNDCLNLNCFSSEPGESFQTTGPSEGPVAESVFIAGMFVKYGKEFEELCRRTGHEELAAEAEKAVDEMYQAVLDAGWDGEWFLRAYDAQSEKVGSKECEEGKIFIEPQGFCVMAGIGKEEGLAEKALDSVHERLETKYGVMILQPAYTRYHLELGEITSYPPGYKENAGIFCHNNPWISIAETVIGRGDRAFEIYRKICPSYIEEISEIHRTEPYVYSQMVAGADAPRFGEAKNSWLTGTAAWTFVNLSQALLGIQPDYDGLIVDPCLPGKFGDFKVDRRFRNAEYHIEIHKPEGVQKGVSWIEVDGEKIAGNQIPLVDGKKEYHVIVQMG

SEQ ID NO: 123 - protein, 817 aa, Eubacterium rectale; identical to SEQ ID NO: 77

SEQ ID NO: 124 - protein, 859 aa, Scardovia inopinata
MRYGHFDDNAREYVIDTPTTPLPWINYLGNENFFSLISNTGGGYSFYKDAKLRRITRYRYNGVPADNGARSYYISLMKDDCPDDEYAEPIETWSPTFLPAKNTLDTYRCRHGLGYSVFETTKKGISSSLTVFVPQGADAEINFLTITNTENSTRTIDITAAVEWCLWNAADDSTNYQRNLSTGEVEIEKTPGSTFLFHKTEYKERRNHYSFFASNQNDIGFDTDRDSFLGKFNGWDSPQTIKTGKSTNSVAHGWAPIAAHHVRLKLGPGQKENLVFLLGYIELEQDEKWEDPDDPRKVGIINKIPAHDLFHKFDTEEKVIKALQQLKDYWTNLLTTFHLHSGDAQLDRMVNVWHQYQCMVTFNMSRSASYFESGVGRGMGFRDSNQDILGFVHLIPERARERIIDIASTQLADGSAWHQYQPLTKKGNADIGGGFNDDPLWLVASTYAYLAETGDSSILSTPTPFNNQKGSQVSLLEHLRRSIHFTLSHRGPHGLPLIGRADWNDCLNLNCFSSQPGESFQTVENKDSSIAESVFIAGMFVLYGNQYLDIIQTYLLNRSTSLKHLPSGWDQALANKEVREVGHAIDEMKTAIETSGWDGDWFLRAYDAQSHPVGSHLNKEGQIFIEPQGMCVMAGIGIENGKATQALSSVSNKLTSEWGTAMLKPAYTTYHIELGEISTYPCGYKENGGIFCHNNPWISIANALIGRDAEAFAVYKNNCPAYLEDKSDIRKVEPYVYCQMVAGPESFCPGEGKNSWLTGAAAWNFLNVSQYLLGIRPTLHGLTIDPHLPESFTSISINRTYQGHMYKINLKRTGSRSLKINGQKIRGNTIPLFPTLSEFMAQSDSSLQANSSLMVEATF

SEQ ID NO: 125 - protein, 822 aa, Cellulomonas uda
MRYGHFDDEAREYVITTPHTPYPWINYLGSEQFFSLLSHQAGGYSFYRDAKMRRLTRYRYNNIPADAGGRYLYVNDGGDVWTPSWLPVKADLDHFEARHGLGYSTITGERNGVRVETLFFVPVGENAEVQKVTVTNTSDSYKSLTLFSFVEFCLWNAQDDQTNYQRNLSIGEVEVEQESPHGSAIYHRTEYRERRDHYAVFAVNTQAEGFDTDRDTFVGAYNSLGEAAVPLKGESANSVASGWYPIGSHSVAVSLAPGESRELVYVLGYVENPDEEKWADDAKQVVNKERAHALLSRFATSEQTDAAFAALKDYWTDLLSTYSVSSNDEKLDRMVNIWNQYQCMVTFNMSRSASFFETGIGRGMGFRDSNQDLLGFVHLIPERARERIIDIASTQFADGSAYHQYQPLTKRGNNDIGSGFNDDPLWLIAGTAAYIKETGDFSILDEPVPFDNEPGSEVPLFEHLTRSFEFTVTHRGPHGLPLIGRADWNDCLNLNCFSTTPGESFQTTENQAGGVAESTFIAAQFVLYGEQYAELAARRGLADVADRARGHVAEMRDALLTDGWDGSWFLRAYDYYGNPIGTDAHDEGKIWIEPQGFAVMAGVGVGEGPQDTDAPAIKALDSVNEMLATDHGMVLQYPAYTTYQVHMGEVSTYPPGYKENGGIFCHNNPWVIIAETVVGRGGRAFDYYKRITPAYREDISDVHRLEPYVYAQMIAGKEAVRHGEAKNSWLTGTAAWNFVTVSQYLLGVRPEYDGLVVDPQIGPDVPSFTVTRVARGATYEITVTNSGTDGSRGRLVVDGTPVEGNLVPYAPAGSTVRVDVTL

SEQ ID NO: 126 - protein, 833 aa, Eubacterium siraeum; identical to SEQ ID NO: 50

SEQ ID NO: 127 - protein, 528 aa, Paenibacillus
MKFGAFDDQRKEYVIHTPQTPYPWINYLGNEQFFGLISNTAGGYTFYRDARLRRLTRYRYNNIPLDTGGRYYYLRDHDNGDFWTPGWMPVKRELDFYECRHGLGYTSITGERGGISVTQLAFIPLGYNGEVHRLTVKNTSSQTKKVSLFSFAEFCLWNAQDDMTNFQRNLSTGEVEVLDSVIYHKTEYRERRNHYAFYSVNRDIDGFDTDRESFVGLYNGLHEPQVVVAGRASNSVASGWSPIGSHEVTLKLAPGETQSLIFILGYVEVPEEEKWESPGVINKKPALEMIEKFATDADVDRALADLAAYWDGLLSKYQIQSSDDKLNRMVNIWNPYQCMVTFNMSRSASYFESGIGRGMGFRDSNQDLLGFVHQIPERARERILDIAATQFEDGSAYHQYQPLTKKGNNEIGSGFNDDPLWLVLGTAAYIKETGDISILDEQVPFDNNPDNTATLFEHLKRSFYHVVHNLGPHGLPLIGRADWNDCLNLNCFSKEPGESLPNDREHRRPRSRVRIYRRLVRLRRPRLR

SEQ ID NO: 128 - protein, 833 aa, Eubacterium siraeum; identical to SEQ ID NO: 48

SEQ ID NO: 129 - protein, 811 aa, Clostridium papyrosolvens; identical to SEQ ID NO: 29

SEQ ID NO: 130 - protein, 825 aa, Faecalibacterium
MPPGLPAADKEEAFMKFGHFDDARKEYVITTPRTPLPWINYLGSEDFFSLVSNTAGGYSFYRDARMRRLTRYRYNSSPLDMDGHHIYIKDGDTVWNPGWQPTKTELDSYACRHGLGYTILEGEKNGVSAAQELFVPTGDACELDRLTLKNKTDAIKELDVFSYVEFCLWDAIDDSSNFQRNFSTGEVEVEPAIIYHKTEYRERRNHYAVFWSNTPVTSFDTTRDAFCGVYGGPADPQAVRAGHCSGSIAHGWAPVGALHIHVTLAPGEEKKILFGLGYIENPQEEKFTAPGVINKERAHAMIARYATDAQVDAARKALADHWEALLSTYHLESGEEKLDRMVNIWHQYQCMVTFNMSRSASYFESGTGRGMGFRDSCQDLLGFVHIIPSRARERILDIAATQFEDGSAYHQYQPLTKKGNRDIGTGFNDDPLWLIAGTAAYLRETGDWSILDEQVPFDNDASKAQSLMEHLRRSFNFTVTHLGPHGLPLIGRADWNDCLNLNCFSEHPGESFQITGPSEGPVAESVFIAGMFVKYGHEYAELCDHLNLADEAAAARKAVDGVEQATLTSGWDGAWFRRAYDAFGKPVGSKECTEGQIFIEPQGMCVMAGIGKETGQAAQALKSVEERLDTKYGVVLHQPAYTSYQLNLGEISSYPPGYKENAGIFCHNNPWISCAEAVLGHGDRAFEVYRKTCPAYIEDISEIHRTEPYVYSQMVAGKDAPTFGEAKNSWLTGTAAWTFFNVSQYILGIQPTLDGLKVDPCIPHTLGGFTVTRRYRGATYHIAVDNTAAVQYGVKSVAVDGKPIEGSLLPLAPEGAVVEVQVTMG

SEQ ID NO: 131 - protein, 827 aa, Ruminococcus; identical to SEQ ID NO: 59

SEQ ID NO: 132 - protein, 822 aa, Cellvibrio gilvus; identical to SEQ ID NO: 88

SEQ ID NO: 133 - protein, 814 aa, Prevotella buccae; identical to SEQ ID NO: 78

SEQ ID NO: 134 - protein, 811 aa, Butyrivibrio fibrisolvens; identical to SEQ ID NO: 83

SEQ ID NO: 135 - protein, 811 aa, Eubacterium cellulosolvens; identical to SEQ ID NO: 85

SEQ ID NO: 136 - protein, 828 aa, Bacteroides; identical to SEQ ID NO: 73

SEQ ID NO: 137 - protein, 812 aa, Thermotoga neapolitana; identical to SEQ ID NO: 34

SEQ ID NO: 138 - protein, 817 aa, Eubacterium rectale; identical to SEQ ID NO: 76

SEQ ID NO: 139 - protein, 812 aa, Dysgonomonas mossii; identical to SEQ ID NO: 60

SEQ ID NO: 140 - protein, 811 aa, Clostridium thermocellum; identical to SEQ ID NO: 25

SEQ ID NO: 141 - protein, 811 aa, Faecalibacterium prausnitzii
MKFGYFDDQNKEYVITTPQTPLPWINYLGSEDFFSLVSNTAGGYSFYRDARMRRLTRYRYNSSPLDMDGHRIYIKDGETVWNPGWQPTKTPLDSYSCRHGLGYTILEGKKDGVTARQELFVPKGDACELDRVTVCNGSTVVKELDLFSYVEFCLWDAVDDSSNFQRNYSTGEVEVEGSVIYHKTEYRERRNHYAVFWANCPVDSFDTTRDAFCGVYGGPADPQAVRAGHCSGSIAHGWAPVGALHIHLTLAPGESHSILFGLGYIENPQQEKFIAPGVINKTRAHAMMERYATDAQVDAARAALRTHWEQLLSTYHLESGEEKLNRMVNIWHQYQCMVTFNMSRSASYYESGTGRGMGFRDSCQDLLGFVHIIPSRARERILDIAATQFEDGSAYHQYQPLTKKGNRDIGTGFNDDPLWLIAGTAAYLRETGDWSILEEQVPFDNDATKAQTLMEHLRRSFNFTCTHLGPHGLPLIGRADWNDCLNLNCFSEHPGESFQITGPSEGPVAESVFIAGMFVKYGHEYAQLCDHLNLTEEAAAARKHIDAVEQATLTAGWDGAWFRRAYDAFGKPIGSKECTEGQIFIEPQGMCVMAGIGKESGQAAQALASVEERLDTKYGVVLLQPAYTSYQLNLGEISSYPPGYKENAGIFCHNNPWISCAEATLGHGDRAFAVYRKTCPAYIEDISEIHRTEPYVYSQMVAGKDAPTFGEAKNSWLTGTAAWTFFNISQYILGIQPTLDGLKVDPCIPHTLSGFTVTRRFRGAVYHITVDNAAGVQHGIKAVTVDGKAISGNVLPLAAAGTEVTVQVTMG

SEQ ID NO: 142 - protein, 813 aa, Abiotrophia defectiva
MKFGYFDDQNKEYVIKTPKTPLPWINYLGNKEFFSLISNTGGGYTFYKDAKLMRITRYRYNDVPADCNGKYFYIKDNDVIWNPGWQPVKESLDSYECHHGMGYSKFLSKKNGVETSLLTFVPLDDACEISSLTLKNNTEEKKELQVFSYLEWCLWNADDDMKNFQRNLSIGEVEIKGSAIYHKTEYRERRNHYAVYAVNAQIDGFDTDRDAFLGEYRSMENPEVVQKGKSSNSVASGWSPIASHQLNVTLNPGEEKRYIFVLGYIENQEEDKWESKGVINKKRAELLLDKYYSDAAVDEAFQELKQYWGKLLAKFNVQTKNEKLNRMVNIWHQYQCMVTFNMSRSASYYESGIGRGMGFRDSCQDLMGFVHLIPERARELIIDIASTQFKDGSAYHQYQPLTKKGNADIGSGFNDDPLWLIAAVSAYVRETGDVSILDEMVPFDNEIGTEVTLMEHLKRSFDFTVNHKGPHGLPLIGRADWNDCLNLNCFSAHPGESFQTFGPSEGPVAESVFIAGMFVKYGKEYGDLCKLIGQDDEVKRTDYEVEKVYKAVLESGWDGEWFLRAYDANGDKVGSHVCEEGKIYIEPQGFCTMANIGVKEGLAEKALSSVEHCLDTKYGIRILAPAYTTYHLELGEVSSYPPGYKENSGIFCHNNPWISIAETVLGHGKRAFDVYQKTCPAYVEEFSEVHRTEPYVYSQMIAGSDAIRFGEAKNSWLTGTAAWTFINASQYILGVYPTLNGLSVNPCIPLEFGDFTVTRNYRGQVYNIQVHNPGGVEKGVKKLIVDGIEVEGTIIPFEENKEEYHIDVWLGKE

SEQ ID NO: 143 - protein, 813 aa, Thermotoga petrophila; identical to SEQ ID NO: 33

SEQ ID NO: 144 - protein, 812 aa, Paludibacter propionicigenes; identical to SEQ ID NO: 64

SEQ ID NO: 145 - protein, 811 aa, Paenibacillus polymyxa; identical to SEQ ID NO: 55

SEQ ID NO: 146 - protein, 811 aa, Caldicellulosiruptor kristjanssonii; identical to SEQ ID NO: 38

SEQ ID NO: 147 - protein, 547 aa, Paenibacillus polymyxa
MENPEEEKWESPGIINKKRAHAMIAQFADETDVERALSELRSYWNDLLSKYTLQSHDDKLNRMVNIWNPYQCMVTFNLSRSASYFESGIGRGMGFRDSNQDLLGFVHQIPERARERIIDIASTQFENGGAYHQYQPLTKKGNHEVGGGFNDDPLWLIVGTSAYIKETGDFGILDEQVPFDGNVDRASSLFEHLKRSFYHVVDNLGPHGLPLIGRADWNDCLNLNCFSATPDESYQTTQNLEGRIAESVFIAGLFVYTGPDFIELCKRRGLNEEAATAQAHVDRMRTATLEHGFDGEWFLRAYDHYGNKIGSKDCEEGQIFIEPQGFCVMAGIGVEEGLAHKALDSTRDRLETPYGIVLQHPPYSRYYMNLGEISSYPPGYKENAGIFCHNNPWIMMAEAVIGRGDRAFELYSKIAPAYLEDISDIHRTEPYVYAQMIAGKDAVREGEAKNSWLTGTAAWNFIAITQSILGIQPEWDGLRIDPCIPKSWGEFTVTRVFRGDTYVIHITNPQHVSKGVATVTVDGTVLTNNILPVAGDGTIHQVKVLLG

SEQ ID NO: 148 - protein, 811 aa, Caldicellulosiruptor saccharolyticus; identical to SEQ ID NO: 45

SEQ ID NO: 149 - protein, 811 aa, Dictyoglomus turgidum; identical to SEQ ID NO: 52

SEQ ID NO: 150 - protein, 811 aa, Clostridium cellulolyticum; identical to SEQ ID NO: 30

SEQ ID NO: 151 - protein, 822 aa, Cellvibrio gilvus
MRYGHFDDEAREYVITTPHTPYPWINYLGSEQFFSLLSHQAGGYSFYRDAKMRRLTRYRYNNIPADAGGRYLYVNDGGDVWTPSWLPVKADLDHFEARHGLGYSRIAGERNGLRVETLFFVPVGENAEVQKVTVTNTSDAYKSATLFSFVEFCLWNAQDDQTNYQRNLSIGEVEVEQDSPYGSAIYHKTEYRERRDHYAVFAVNTAADGFDTDRDTFVGAYNSLGEAAVPFKGESANSVASGWYPIGSHSVSVSLAPGESRELVYVLGYLENPDEQKWADDAHQLINREPAHALLSRFATSEQTDAAFAALQQHWTQLLSTYSVSSTDEKLDRMVNIWNQYQCMVTFNMSRSASFFETGIGRGMGFRDSNQDLLGFVHLIPERARERIIDIASTQFPDGSAYHQYQPLTKRGNNDIGSGFNDDPLWLIAGVAAYVKETGDFSILDEPVPFDNEPGTEVPLFEHLTRSFEFTVTHRGPHGLPLIGRADWNDCLNLNCFSTTPGESFQTTENQEGGAAESVFIAAQFVLYGEQYAQLAERRGLADVATRARGLVEEMRAAVLSDGWDGRWFLRAYDYYGNPIGTDAHDEGKIWIEPQGFAVMAGIGVGEGPADTDAPAVQALDAVNEMLATDHGMVLQYPAYTTYQVHMGEVSTYPPGYKENGGIFCHNNPWVIIGETVLGRGARAFDYYKRITPAYREDISDVHRLEPYVYAQMIAGKEAVRHGEAKNSWLTGTAAWNFVTVSQHLLGVRPDFDGLVVDPQIGPEVPSFTVTRVARGATYEISVTNSGEDGARGSLVVDGTPIDGNLVPYAPAGATVRVQVTV

SEQ ID NO: 152 - protein, 811 aa, Dictyoglomus thermophilum; identical to SEQ ID NO: 53

SEQ ID NO: 153 - protein, 811 aa, Caldicellulosiruptor kronotskyensis; identical to SEQ ID NO: 42

SEQ ID NO: 154 - protein, 813 aa, Thermotoga maritima; identical to SEQ ID NO: 32

SEQ ID NO: 155 - protein, 811 aa, Clostridium thermocellum; identical to SEQ ID NO: 13

SEQ ID NO: 156 - protein, 812 aa, Teredinibacter turnerae; identical to SEQ ID NO: 57

SEQ ID NO: 157 - protein, 813 aa, Thermotoga neapolitana; identical to SEQ ID NO: 31

SEQ ID NO: 158 - protein, 811 aa, Saccharophagus degradans; identical to SEQ ID NO: 12

SEQ ID NO: 159 - protein, 822 aa, Cellulomonas flavigena
MRFGHFDDEAREYVVTTPHTPYPWINYLGSEQFFSLLSHQAGGYSFYRDAKMRRLTRYRYNNIPADAGGRYLYVNDGGDVWTPSWLPVKADLDHFEARHGLGYSRITGERGGLRVATTFFVPLGENAEVQRVAVTNTSDAEKTVTLFSFVEFCLWNAQDDQTNYQRNLSIGEVEVEQDGPHGSAIYHKTEYRERRDHYAVFGVNTHADGFDTDRDTFVGAYNSLGEAAVPRAGQSADSVASGWYPIGSHSVRVTLAPGETRDLVYVLGYLENADDEKWADDAHQVVNKEKAHGLLGRFATAEQADAAVEALQVYWTELLSTYSVRSDDEKLDRMVNIWNQYQCMVTFNMSRSASFFETGIGRGMGFRDSNQDLLGFVHLVPDRARERIIDIASTQFEDGSAYHQYQPLTKRGNNDIGSGFNDDPLWLIAGVAGYVKETGDFSILDEPVPFDNEPGSEVPLFEHLTRSFDFTVNHRGPHGLPLIGRADWNDCLNLNCFSTTPGESFQTTENQAGGHAESVFIAAQFVLYGEQYAELAERRGLTEVASQARKVVGEVREAVLEHAWDGRWFLRAYDFYGNPVGTDAKPEGKIWIEPQGFAVMAGIGVGEGPDDTEAPAIQALDAVEEMLGTPHGLVLQYPAYTTYQLELGEVSTYPPGYKENGGIFCHNNPWVIIAETVVGRGDKAFDYYKRITPAYREEISDVHKLEPYVYAQMIAGKEAPRAGEAKNSWLTGTAAWNFVAVSQYLLGVRPDWDGLVVDPQIGPDVPSFTVTRVARGATYEISVTNSGARGSRASIVVDGTPVEGNLVPYAPAGSTVRVEVTL

SEQ ID NO: 160 - protein, 817 aa, Butyrivibrio proteoclasticus
MKYGFFDDAALEYVITTPKTPLPWINYLGNKEFFSLISNTCGGYTFYKDAKLLRLTRYRYNNVPYDNNGKYFYIKDNTDSACSVVWNPGWQPVKTTLDQYECRHGLGYSTFTSSKNNVEAKVLTFVPMNDNCEISKVTITNNKETAAKLSLFSYVEWCLWNADDDMKNFQRNLSTGEVEVTDGGSTIYHKTEYRERRNHYAIYSVNSAVDGFDTSRDAFLGAYNGPDSPDVVAEGKCTNSVASGWSPIASHQINIDLAAGESKTFIFVLGYIENPEDDKWEAPGVVNKKPALKMLEAYKTEAAVDAALVELKNYWKELLSNYHISSSNEKVDRMVNIWNQYQCMVTFNMSRSASYYESGIGRGMGFRDSCQDLLGFVHLIPDRARQRIIDIASTQFQDGSAYHQYQPLTKKGNSDIGSGFNDDPLWLIAGTSAYVRETGDLSILKEMVPFDNDMSVAKTLMGHLKCSFDFTATHKGPHGLPLIGRADWNDCLNLNCFSEHPGESFQTFGPSEGPVAESVFIAGMFVKYGEEYAQLAELLGDDAEAKRAREEIAKVYQAAITAGWDGEWFVRAYDAYSNKVGSKECEEGQIYIEPQGFCVLAGIGVKEGLAEKALKSVEERLDTKYGVMILQPAYTKYHLELGEVSSYPPGYKENAGIFCHNNPWVSIAETVLGHGDRAFEIYRKTCPAYIEDISEIHCTEPYVYSQMVAGRDAKFFGQGKNSWLTGTAAWTFVNISQYILGVYPTHNGLSINPCVPADFGDFEITRKYRDAVYHISVKQNGVQKGIKKLTVNGKEVSGNVIPYESGVKEYTVVAEMG

SEQ ID NO: 161 - protein, 811 aa, Anaerocellum thermophilum; identical to SEQ ID NO: 40

SEQ ID NO: 162 - protein, 827 aa, Xylanimonas cellulosilytica
MRYGHFDDSAREYVITTPHTPYPWINYLGSEQFFSLLSHQAGGYSFYRDAKLRRLTRYRYNNIPTDVGGRYLFVNDGGDVWTPSWLPVKADLDHFEARHGLGYSSITGERGGLRVQTTFLVPLGETAEVQKITFTNTSDAAKSISAFTYVEFCLWNAEDDQTNYQRNLSIGEVEVETSTPSGGAAIYHRTEYRERRDHFAVYGVNVPTGGFDTDRDAFVGAYNTLGEAAVPRAGASTGSVASGWYPIGSHQLDVELAPGESTDVVVVLGYVENPQEEKWADDAHQVVNKERAHALLSRFATVDAVDAALAALQDHWTNLLSTYEVRSGDEKLDRMVNIWNQYQCMVTFNMSRSASYFETGMGRGMGFRDSSQDLLGFVHLIPERARERIIDIASTQFPDGSAYHQYQPLTKRGNHNLGSGFNDDPMWLVGGVAAYIKETGDWGILDEPVPFDNEPGTEVPLFEHLSRSVDFVLTHLGPHGLPLIGRADWNDCLNLNCFSTTPGESFQTTGNKTGGVAESTFIGAQFVLYGREYVALAQHRGAADEAVRAAEAVEAMTTTMLTDAWDGRWFLRAFDYYGNPIGTDAHDEGKIWIEPQGFSVMAGIGVSSTDPTAPEWAASPAGKALTAVEELLGTDHGMVLQYPAYTTYQVHMGEVSTYPPGYKENGGIFCHNNPWVIIGQTVAGDGAGAFANYRKITPAYREDISDVHQLEPYVYAQMIAGKEAVRHGQAKNSWLTGTAAWNFVAVSQYLLGVRPDYEGLVVDPQLGPDVPEFTVTRVARGATYEITVRNSGTPGARAALTVDGRPIDGRTVPYAAAGTTVRVEAVL

SEQ ID NO: 163 - protein, 813 aa, Prevotella ruminicola; identical to SEQ ID NO: 86

SEQ ID NO: 164 - protein, 817 aa, Eubacterium eligens
MQFGFFDDINKEYVITTPETPLPWINYLGCENFFSLKSNTGGGYCFYKDAKLLRLTRYRYNNSPLDNNGHYIYIKDEDTIWNPGWQPSQTPVEDYTCRHGLGYTVISSSKNDIKATQTALVPIGDNCELDKLTIKNTGNSVKHLSVYSYIEFCLWNAVDDCNNFQRNFSTGEVEVQPEINIGTAAMSAIYHKTEYRERRNHYAVHAVSTAANGFDTSRESFIGTYGSPAMPKAVKEGTSYNSIASGWSPVGSFRIDIDLEPGEEKEYVFIIGYAENPDDKKWESFGIINKEPAYALLEKYNTPAKFDTALAALKDYWTHLLSSYIVDTEDKKLCRMVNIWNQYQCMVTFNMSRSASYYESGTGRGMGFRDSCQDLLGFVHLIPDSARQRILDIAATQFEDGSAYHQYQPLTKKGNSDIGSGFNDDPLWLIAGTAAYLKETGDFSILDEKVAFDCDTSKAQPLMEHLRRSFNYTTTHLGPHKLPLIGRADWNDCLNLNCFSSAPGESFQTTGPSEGPVAESVFIAGMYVKYGNEYADICHIAGLTEEENAVRSHVDDMYKAVLDAGWDGEWFLRAYDAESRKVGSHECEDGQIYIEPQGFCVMAGIGVKEGLAQKAMDSVEKILDTKYGIMILQPAYRSYHLELGEVSSYPPGYKENAGIFCHNNPWVSIAETVIDDKNRAFETYKKICPAYLEEISEIHRTEPYVYSQMIAGKDAASFGEAKNSWLTGTAAWTFTSISQYILGVRASFEGLTIDPCLPDSIKNLTITRKFRDAVYNITISNEKHERVSSLIVNGSEISGNTVPYNKDTKVYNVTVNI

SEQ ID NO: 165 - protein, 831 aa, Clostridium phytofermentans; identical to SEQ ID NO: 41

SEQ ID NO: 166 - protein, 813 aa, Thermotoga naphthophila; identical to SEQ ID NO: 33

SEQ ID NO: 167 - protein, 811 aa, Caldicellulosiruptor owensensis; identical to SEQ ID NO: 39

SEQ ID NO: 168 - protein, 811 aa, Maribacter; identical to SEQ ID NO: 56

SEQ ID NO: 169 - protein, 811 aa, Caldicellulosiruptor hydrothermalis; identical to SEQ ID NO: 44

SEQ ID NO: 170 - protein, 822 aa, Cellulomonas fimi; identical to SEQ ID NO: 88

SEQ ID NO: 171 - protein, 810 aa, Clostridium cellulovorans; identical to SEQ ID NO: 43

SEQ ID NO: 172 - protein, 811 aa, Caldicellulosiruptor obsidiansis; identical to SEQ ID NO: 36

SEQ ID NO: 173 - protein, 819 aa, Halothermothrix orenii; identical to SEQ ID NO: 67

SEQ ID NO: 174 - protein, 811 aa, Cellulosilyticum lentocellum; identical to SEQ ID NO: 49

SEQ ID NO: 175 - protein, 827 aa, Ruminococcus albus; identical to SEQ ID NO: 66

SEQ ID NO: 176 - protein, 817 aa, Eubacterium rectale; identical to SEQ ID NO: 76

SEQ ID NO: 177 - protein, 809 aa, Clostridium saccharolyticum
MKYGYFDDQEKEYVITVPDTPLPWINYLGTEDFFSLVSNTGGGYSFYKDAKLLRLTRYRYNNVPLDSNGHYYYINENGTIWNPGWQPTQTALDFYECRHGLGVTKYKGMKDGLFAEVTAFVPLHDTCEIHKVVLKNESREPKDFTLFSYVEFCLWNAVDDMTNFQRNLSTGEVEVEGSVIYHKTEYRERRNHYAYYSVNADIQGFDTDRNTFVGVYGSNQLPFMVKKNTSGDSMASGWSPIASHRLTLHLEPGEETGFIFVLGYGENPREEKWTAPNVINKKSAKAVLAKYHTSQQVDEALAALKQYWEQLLSNYSVTMADEKTARMVNTWNQYQCMVTFNMSRSASYYESGTGRGMGFRDSCQDLLGFVHMIPERARERIIDIASTQFEDGSAYHQYQPLTKKGNRDIGSGFNDDPLWLIAGVSAYIRETGDLSLLEESVPFDNDPEKSQPLMEHLRRSFRFTKTHLGPHGLPLIGRADWNDCLNLNCFSTEPGESFQTTGPSEGPVAESVMIAGMYVKYGKEYAQLCRLMGLTAEADEAEASVQEVSDAVIQSGWDGAWFLRAYDALGQKVGSRECREGRIFIEPQGFCIMGGIGIEEGFAEKALDSVKELLDTDHGIVLHQPAYTRYQENLGEISSYPPGYKENAGIFCHNNPWISISETMLRRGNRAYEVYRRTCPAHREDSSEIYKAEPYVYAQMIAGKDAPHFGEAKNSWLTGTAAWSFVCISQYILGIRPGFKGLIVDPCLPDSIREFSAVRKFRGADYYIHADHRKPDGKVSIVVDGTPVDGKEIPFADGKKEYHISLIWE

SEQ ID NO: 178 - protein, 812 aa, Mahella australiensis; identical to SEQ ID NO: 28

SEQ ID NO: 179 - protein, 811 aa, Clostridium thermocellum; identical to SEQ ID NO: 13

SEQ ID NO: 180 - protein, 813 aa, Thermotoga; identical to SEQ ID NO: 33

SEQ ID NO: 181 - protein, 828 aa, Uncultured organism; identical to SEQ ID NO: 75

SEQ ID NO: 182 - protein, 803 aa, Vibrio cholerae
MKFGYFDDNNKEYIATTPCTPIKWCNYVGTLEFGGLVDSNGGVVLCKGDPALNRITKYIAQLPNSDFKGSTVYLKVTNREGKVEVFSPFYTPTLKPLEKFENHTGLSYTKIISEGYGVRCEVTLFVPKDAPVLLEDIKVTNISDEELHVDVVPVFEFTHFDALKQLVNADWVPQTMTLKAHQQASGHTVLEQYAFMKRDYAVNLMTADRPATSFDGDRQKFLGNMGYGSWAAPEKLFTAELGNSECLRGDNIGALNLRLGWLAPQQNERTVVQLTQMPSLAQAESMLAKYRDHQEVDKAFDALATHWDNYLAAVQVETPDPAMNSMLNIHNPRQCHTTKNWSRYLSLYQLGYGARGIGFRDSSQDTLGVITHMPEEAREFIERLLSVQNVDGSAMHQFFPSTMEANAGDSREEEDRPDYYGDDHLWIVYAVTQYVKETGNAAFLDKLIPFYQKDKQGKPLESASVWEHLCRAIEFTRGNTGQHGLPLLGFADWNDTVNLPTGAESLMVACMYGKALLDMLDLCRLRGEDDRAAQYQAQYEQMKAIVNQCGWDGEWFVRYFDEQGQPVGSHTNAQGQIYTNGQSWPVIAGFAEQERATQALNSVYTKLNTANGIKLSTPGYNGFNPNLGGVSTYPPGAKENGGIFLHSNPWVMIAEAKMGNGDRAYEYYRQINPASKNDVIDIFESEPYCYPQNILGDEHPQFGLGRNAWLSGTSSWTYVAGTQWILGVRPDIDGLIVDPCIPSDWKEFRVKRQFRGATYHIHVTNPDKVSKGVAELRVNGEVLAGNKVPVFTEGEHQVEVRLG

SEQ ID NO: 183 - protein, 808 aa, Spirochaeta thermophila
MSYGHFEGREYVITNPRTPVKWINYVGTIDFGGFVDHTGGLLVCKGDPALNRITKYITQLPSSEFKGSTIYLRGRRGDRSFLYSPYYVPTLHEYDRYECRIGLGYSRFLMEYVGIRTEITVFVPEGESVVLQDVRIRNTGSDTVEVLDLIPVVEYSHFDALKQLTNADWVPQTMTSKAIGRPGGLLVLRQCAFMQTGRAENFLTSNSPVSSFEADRRRFLGENEYGTWKMPFSLVDGREFSNYEPLRGDNVGALMHHVGPLAPGEERRVIVQLGQVESVEKAMPLIERFREPEEVDAAFARMQAFWEEYLNVCQVETPDPEFDLLVNTHNPRQCYVTLNWSRYLSYYQLGYGARGIGVRDSSQDVMAVVAGAPGRAKKLLRKLLSVQKRNGSSMHQFNPKTMEATMGDAREMEDRPQYYGDDHLWLVFAVCHYIAETGDYAFLEEEIPFYEKDKEGRPLESARVLEHLERALAFTWNDTGVHGIPHLGFADWNDTVNLKIGAESFFIAHQFSKAARDLADLMDHLGKKEKAETYRSYAEEMKRRVNEVGWDGEWYLRYFDWDGSPIGSRGNVHGKIYTNAQSWAVISGNATPERARKALDAVYTHLNTRYGIKLSTPGYDHYDPNLGGVTTYPPGAKENGGIFLHANPWVIIAECMMGNGERAYQYHRQVNPIKKNEIIDIYEVEPYVFCQNILGDEHPQFGLGRNSWLTGTASWMYQAATQYILGVRVTHSGIVIDPCLPSEWEGFRMRRKVRGTWYEITVRNPEHVSRGVQSCTLDGEAVEVSGGAARIPFDTEGKDHVVEVILGA

SEQ ID NO: 184 - protein, 984 aa, Clostridium thermocellum
MITKVTARNNKITPVELLNQKFGNKINLGNFADAVFTDAAFKNVAGIANLPMKAPVMQVLMENCIVSKYLKQFVPDRSVCFVEEGQKFYIVLEDGQKIEVPEDVNKALKATVSDVKHWAGYLTEDGEHVIDLLKPAPGPHFYVNLLIGNRLGFKRTLQTTPKSVVDRFGRGSFRSHAATQVLATRFDMRQEENGFPANRQFYLYEDGKQIFYSALIDDNIVEATCKHSCNRTVIKYKTACNLEITRTIFLVPHKKGFPLATELQRIEIKNASDKARNLSITYTGMFGTGAVHAIFEDVTYTNVIMQSAALYNDKGEFIGITPDYYPEEFKQDTRFVTMIVRNGDEKSFPQSFCTDYNDFVGTGTLEHPAGGCNLNNKLNRKGPGFFALGAPFTVEPGKTVIIDTFTGLSSSKDNENYSDAVMLRELDNLLRYFEKSESVEETLNEIINFHENYGKYFQFNTGNKLFDSGFNRNLAFQVLYQTFMSRSFGQTQKGYREIGFREIQDLFASMYYFINIGYQDFVKELLFEWTANVYKMGYANHNFYWVGKQPGLYSDDSLWLLQAYYRYIIYTKDTSVLNEEVPVADGNNEKRAVRETLKAIIQYSACISVGDHGLPLLDLADWNDCLKIASNSIDGATKEKLYYEQLKKTNGKYGDRFMSDYSESVMNAFLLKLAIDHLAEIATLDNDTQLAQQMSELSKEVTDRIQKHAWKENFFARVLINRYKDGSYTYLGAKGDKLSADPNIDGVYFLNSFAWSVLSDVATDEQIAIMVDVIKKHLLTPYGLRLVTPADLNKIANDTATGHYFFGDRENGAVFKHASMMAVAALIKAAKKVKDNELAKEMARIAYFMIDLVLPYKNLENPFQVAGNPRICTQYINTDTGENIGPLLSGTATWLNLNLISLAGIEYTRDGISFNPILREEETQLNFTLKAPKCSYKFSITKPVGFARMESSEYELFVDGQKIDNTVIPMYTDEKEHIVTLKFK

SEQ ID NO: 185 - protein, 780 aa, Clostridium stercorarium
MRYGYFDEKAREYVITRPDTPTPWINYIGNGKYGGIVTNTGGGYSFHKDPQNRRITRYRYNNLPTDRPGRYIYVRDRLTGEYWNPGYQPVQRKLDSYRCRHGMGYTVLEGEYKGIAADVTYFVPDDRDFEIWLVQIRNLCHVERNLQVFSYAEFCFWDAIMDQQNVDWVQQINQGRYEDRLITWHPHHFKDACAFFATNAEINSFDTNLEAFIGRYRCESNPIAVETGACSNSVSYRMNGVGAFCIDVNLKPGEEREIIFILGFTENKSTIRDEIRDYLNVEYAKEALKRLKDSWEEYLDKLQIETPDRETNLFVNTWNQYQCKITFNWSRFVSMYSWGLGRGIGIRDSAQDTLGVMHSIPELAGGLIKRLIHCQYTDGRVYHLFFPLTGEGGIGDAPVVKFDWYSDDHLWLPIAANAYLKETANFDFFQSVVPYNDNKTEGTVWEHLNRAMEFTYNHRGPHALPYSRADWNDTLNLDMGNGIAETLFTSMLFSEPPLKRFRCRISDKRIATKYRYWYDEMKQAINEWCWDGEWYIRAFDDEGNVLGSGKNRYGKIFINSQSWAVLSMVAPEEYAKKCLESVYRHLNTKYGIVKVYPAYPEYNPKIGGMTTYPPGAKENGGIFAHTNPWVMIAECMMGNGRRAYQYYRQILPLTRNDDADLLEVEPYVYCQNILGKEHPQFGIGRNSWLTGTAAWNMVAVSQYILGIRPEYDGLTVDPCIPPDWKGFKVRRIFRGCVYNIEVRNPEGVRRCEKNCRRGVETDKIPVKPAGTVCECVVIMG

SEQ ID NO: 186 - protein, 980 aa, Clostridium thermocellum
MITKVTARNNKITPVELLNQKFGNKINLGNFADRVFTDAAFKNVAGIANLPMKAPVMQVLMENCIVSKYLKQFVPDRSVCFVEEGQKFYIVLEDGQKIEVPEDVNKALRATVSDVKHWAGYLTEDGEHVIALLKPAPGPHFYVNLLIGNRLGFKRTLQTTPKSVVDRFGRGSFRSHAATQVLATRFDMRQEENGFPANRQFYLYEDGKQIFYSALIDDNIVEATCKHSCNRTVIKYKTACNLEITRTIFLVPHKKGFPLATELQRIEIKNASDKARNLSITYTGMFGTGAVHAIFEDVTYTNVIMQSAALYNDKGEFIGITPDYYPEEFKQDTRFVTMIVRNGDEKSFPQSFCTDYNDFVGTGTLEHPAADVIEQQAEPQRSGILCPGCAVYVEPGKTVIIDTFTGLSSSKDNENYSDAVMLRELDNLLRYFEKSESVEETLNEIINFHENYGKYFQFNPGNKLFDSGFNRNLALEVLYQTFMICSFGQTQKGYREIGSGNSGLFASMYYFINIGYQDFVKELLFEWTANVYKMGYANHNFYLVGKQRDCIPMTACLLQAYYRYIIYTKDTSVLNEEVPVADGNNEKRAVRETLKAIIQYSACISVGDHGLPLLDLADWNDCLKIDSNSIDGATKEKLYYEQLKKTNGKYGDRFMSDYSESVMNAFLLKLAIDHLAEIATLDNDTQLAQQMSELSKEVTDRIQKHAWKENFFARVLINRYKDGSYTYLGAKGDKLSADPNIDGVYFLNSFAWSVLSDVATDEQIAIMVDVIKKYLLTPYGLRLVTPADLNKIANDTATGHYFFGDRENGAVFKHASMMAVVALIKAAKKVKDNELAKEMARIAYFMIDLVLPYKTEIRSRLQEIQGYALNISILTQEKILTFVEPGTATWLNLNLISLAGIEYTRDGISFNPILREEETQLNFTLKAPKCSYKFSITKPVGFARMESSEYELFVDGQKIDNTVIPMYTDEKEHIVTLKFK

SEQ ID NO: 187 - protein, 984 aa, Clostridium thermocellum
MITKVTARNNKITPVELLNQKFGNKINLGNFADAVFTDAAFKNVAGIANLPMKAPVMQVLMENCIVSKYLKQFVPDRSVCFVEEGQKFYIVLEDGQKIEVPEDVNKALKATVSDVKHWAGYLTEDGEHVIDLLKPAPGPHFYVNLLIGNRLGFKRTLQTTPKSVVDRFGRGSFRSHAATQVLATRFDMRQEENGFPANRQFYLYEDGKQIFYSALIDDNIVEATCKHSCNRTVIKYKTACNLEITRTIFLVPHKKGFPLATELQRIEIKNASDKARNLSITYTGMFGTGAVHAIFEDVTYTNVIMQSAALYNDKGEFIGITPDYYPEEFKQDTRFVTMIVRNGDEKSFPQSFCTDYNDFVGTGTLEHPAGGCNLNNKLNRKGPGFFALGAPFTVEPGKTVIIDTFTGLSSSKDNENYSDAVMLRELDNLLRYFEKSESVEETLNEIINFHENYGKYFQFNTGNKLFDSGFNRNLAFQVLYQTFMSRSFGQTQKGYREIGFREIQDLFASMYYFINIGYQDFVKELLFEWTANVYKMGYANHNFYWVGKQPGLYSDDSLWLLQAYYRYIIYTKDTSVLNEEVPVADGNNEKRAVRETLKAIIQYSACISVGDHGLPLLDLADWNDCLKIDSNSIDGATKEKLYYEQLKKTNGKYGDRFMSDYSESVMNAFLLKLAIDHLAEIATLDNDTQLAQQMSELSKEVTDRIQKHAWKENFFARVLINRYKDGSYTYLGAKGDKLSADPNIDGVYFLNSFAWSVLSDVATDEQIAIMVDVIKKHLLTPYGLRLVTPADLNKIANDTATGHYFFGDRENGAVFKHASMMAVAALIKAAKKVKDNELAKEMARIAYFMIDLVLPYKNLENPFQVAGNPRICTQYINTDTGENIGPLLSGTATWLNLNLISLAGIEYTRDGISFNPILREEETQLNFTLKAPKCSYKFSITKPVGFARMESSEYELFVDGQKIDNTVIPMYTDEKEHIVTLKFK

SEQ ID NO: 188 - protein, 803 aa, Vibrio splendidus
MKFGYFDDKNKEYVATTPCTPIKWCNYVGTLDFGGIVDSNGGVLLCKGDPALNRITKYIAQLPNSDFKGSTMYLKVRDEAGNLEIFSPFYTPTLKPLDKFENHTGLSYTTIIAEAFGVRCEATFFVPKADQVLLQDIKVTNISDKALHVDVVPVYEFTHFDALKQLLNADWVPQTMTLKAHQQESGHTVLEQYAFMKRDYAVNLMTADRPATSFDGDRQSFLGQFGYGTWAAPQALENDELGNTECLRGDNIGALNLRLGWLSPEQTERTVVQIVQEESLGAAQPLLAKYRDHQVVDSAFAELAEHWDSYLKAVQVETPDPAMNSMLNVHNPRQCHTTKNWSRYLSLYQLGYGARGIGFRDSSQDTLGVITHMPEEAREFIERLLSVQNTNGSAMHQFFPSTMEANAGDSREEEDRPDYYGDDHLWIIYAVTQYVKETGNADFLNKEIPFYQKDKAGNPVETGTVWDHLCRAIKFTYTNTGEHGLPLLGFADWNDTVNLPTGAESMMVANMYGKALLDMLDLCELRGEEQLTAQFKEQYQQMQSTVNECGWDGEWFVRYFDEQGMPIGSHKNEQGQIYTNGQSWPVISGFATQERAAQALDSVYNKLNTTNGIKLSTPGYNGFDPQLGGVSTYPPGAKENGGIFLHSNPWVMIAEAKMGNGERAYEYYRQINPASKNDDIDTFESEPYCYPQNILGDEHKQFGLGRNAWLSGTSSWTYVAGTQWILGVRPEIDGLLVDPCIPAEWPEFKVRRQFRGATYNIHVTNPNNVCKGVVEMKVNGDLISGNKAPVFTSGEHTVEVVLG

SEQ ID NO: 189 - protein, 803 aa, Vibrio splendidus
MKFGYFDDKNKEYVATTPCTPIKWCNYVGTLDFGGIVDSNGGVLLCKGDPALNRITKYIAQLPNSDFKGSTMYLKVRDEAGNVEVFSPFYTPTLKPLDKFENHTGLSYTTIIAEAFGVRCEATFFVPKADQVLLQDIKVTNISDKALHVDVVPVYEFTHFDALKQLLNADWVPQTMTLKAHQQESGHTVLEQYAFMKRDYAVNLMTADRPATSFDGDRQSFLGNLGYGTWAAPQALNNDELGNTECLRGDNIGALNLRLGWLSPEQTERTIVQIAQEQSLEAALPLLAKYRDHQVVDSAFAELAEHWDGYLQAVQVETPDPAMNSMLNVHNPRQCHTTKNWSRYLSLYQLGYGARGIGFRDSSQDTLGVITHMPEEAREFIERLLSVQNTNGSAMHQFFPSTMEANAGDSREEEDRPDYYGDDHLWIIYAVTQYVKETGNADFLNKDIPFYQKDKAGNPVETGTVWNHLCRAIEFTYTNTGEHGLPLLGFADWNDTVNLPTGAESMMVANMYGKALLDMLDLCELRGEVQLTAKFNDQYQQMQSTVNECGWDGEWFVRYFDEQGLPIGSHKNEQGQIYTNGQSWPVISGFATQERATQALDSVYNKLNTTNGIKLSTPGYNGFDPQLGGVSTYPPGAKENGGIFLHSNPWVMIAEAKMGNGERAYEYYRQINPASKNDDIDTFESEPYCYPQNILGDEHKQFGLGRNAWLSGTSSWTYVAGTQWILGVRPEVDGLLVDPCIPAEWPEFKVRRQFRGATYHIHVTNPNNVCKGVVEMKVNGDLISGNKAPVFTSGEHTIEVILG

SEQ ID NO: 190 - protein, 804 aa, Vibrionales bacterium
MKFGYFDDKNKEYVATTPCTPIKWCNYVGTLDFGGIVDSNGGVLLCKGDPALNRITKYIAQLPNSDFKGSTMYLKVRDEAGNVEVFSPFYTPTLKPLDKFENHTGLSYTTIIAEAFGVRCEATFFVPKADQVLLQDIKVTNISDKALHVDVVPVYEFTHFDALKQLLNADWVPQTMTLKAHQQESGHTVLEQYAFMKRDYAVNLMTADRPATSFDGDRQSFLGQFGYGTWAAPQALENDELGNTECLRGDNIGALNLRLGWLSPEQTERTVVQIAQEESLDAAQPLLAKYRDHQVVDSAFAELAEHWDSYLQAVQVETPDPAMNSMLNVHNPRQCHTTKNWSRYLSLYQLGYGARGIGFRDSSQDTLGVITHMPEEAREFIERLLSVQNTNGSAMHQFFPSTMEANAGDSREEEDRPDYYGDDHLWIIYAVTQYVKETGNADFLNKEIPFYQKDKAGKPVETGTVLDHLCRAIEFTYTNTGEHGLPLLGFADWNDTVNLPTGAESMMVANMYGKALLDMLDLCELRGEEQLTAQFKEQYQQMQSTVNECGWDGEWFVRYFDEQGMPIGSHKNEQGQIYTNGQSWPVISGFATQERATQALDSVYNKLNTTNGIKLSTPGYNGFDPQLGGVSTYPPGAKENGGIFLHSNPWVMIAEAKMGNGERAYEYYRQINPASKNDDIDTFESEPYCYPQNILGDEHKQFGLGRNAWLSGTSSWTYVAGTQWILGVRPEIDGLLVDPCIPAEWPEFKVRRQFRGATYHIHVTNPSNVCKGVVEMKVNGDLISGNKAPVFTSGEHTVEVVLGS

SEQ ID NO: 191 - protein, 803 aa, Vibrio sp
MKFGYFDDKNKEYVATTPCTPIKWCNYVGTLDFGGIVDSNGGVLLCKGDPALNRITKYIAQLPNSDFKGSTMYLKVRDEAGNVEVFSPFYTPTLKPLDKFENHTGLSYTTIIAEAFGVRCEATFFVPKADQVLLQDIKVTNISDKALHVDVVPVYEFTHFDALKQLLNADWVPQTMTLKAHQQESGHTVLEQYAFMKRDYAVNLMTADRPATSFDGDRQSFLGNLGYGTWAAPEALNNDGLGNTECLRGDNIGALNLRLGWLSPEQTERTIVQIAQEQSLEAALPLLAKYRDHQVVDSAFAELAEHWDGYLQAVQVETPDPAMNSMLNVHNPRQCHTTKNWSRYLSLYQLGYGARGIGFRDSSQDTLGVITHMPEEAREFIERLLSVQNTNGSAMHQFFPSTMEANAGDSREEEDRPDYYGDDHLWIIYAVTQYVKETGNADFLNKEIPFYQKDKAGNPVETGTVWNHLCRAIEFTYTNTGEHGLPLLGFADWNDTVNLPTGAESMMVANMYGKALLDMLDLCELRGEAQLTAKFKDQYQQMQSTVNECGWDGEWFVRYFDEQGLPIGSHKNEQGQIYTNGQSWPVISGFATQERATQALDSVYNKLNTANGIKLSTPGYNGFDPQLGGVSTYPPGAKENGGIFLHSNPWVMIAEAKMGNGERAYEYYRQINPASKNDDIDTFESEPYCYPQNILGDEHKQFGLGRNAWLSGTSSWTYVAGTQWILGVRPEVDGLLVDPCIPAEWPEFKVRRQFRGATYHIHVTNPNKVCKGVVEMKVNGDLISGNKAPVFTSGEHTIEVILG

SEQ ID NO: 192 - protein, 984 aa, Clostridium thermocellum; identical to SEQ ID NO: 187

SEQ ID NO: 193 - protein, 842 aa, Fibrobacter succinogenes
MATKTVKKSAAKKAPAKKTAKVAAPKYGYFDDAAKEYVLTTPATPIKWCNYVGTLNFGGIVDTTGGTLVCKGDPALNRITKYIAQMPCSDFKASTIYIRIKDGKNYKIFSPFYVPTLVKLDKWECHVGLSYMRWIAEVYGLRVQVTIFVPTGSNTLLQDIQVTNIAGGSKEVDIIPVYEFSHFEAEKQLTNADWVPQTMTLKGHWEKDGHVVLEQYAYMKRDYAVNYVTADCKVGSFDGDRRVFLGQNEMGSWANPLSLQNKELANSECDRGDNIAALMIHAGKIAAKKTFRTCTQLGQEQSLKVAAKAIKKYRDLKNVDKAFEELAKFWENYLSTIQVKTPDASFNTMVNVHNPRQCHTTKNWSRYLSLYQLGYGTSRGIGYRDSTQDLMGVMSHMPEEALVLTKNLISVQRPEGNAMHQYAPLALAEDTGNEANAGDSREKAGVLDANGNPAYADWYGDDHLWIVLTVATYLKETGKMDLLNEEIPFYVAGKKHAERPTGTVLEHLKRALKFTREHLGQHNLPLLGFADWNDCMNLPLGAESTFNTALYAKALLEMMGIEEALGDKEAVEMYKGWYEDVKKAFNDSAWDGKWWTRWFDKDGNGYGVSSAKYGKIYCNGQSWPVIAGIAFGDRAVQGMDSLNKLLNTKYGVKSSTPGYRGFEPAVGGISTYPPGAKENGGIFLHTNPWVMIAETILGRGDNAFQYYNQINPASKNGILDVFESEPYCYPQNILGDEHKQFGMGRNAWLSGTSTWTYQAATQFILGIRASFNGLVVDPCIPSAWAGFEATRKFRGATYQITVKNPDHVCKGVAKMVVDGQEIDSNVAPIFTKGIHKVEVTLG

SEQ ID NO: 194 - protein, 808 aa, Spirochaeta thermophila
MSYGHFEGREYVITNPRTPVKWINYVGTIDFGGFVDHTGGLLICKGDPALNRITKYITQLPSSEFKGSTIYLRGRRGDRSFLYSPYYVPTLHEYDRYECRIGLGYSRFLMEYVGIRTEITVFVPEGESVVLQDVRIRNTGSDPVEVLDLIPVVEYSHFDALKQLTNADWVPQTMTSKAIGRPGELLVLRQCAFMQIGRAENFLTSNWPVSSFEADRRRFLGENEYGTWKVPFSLVDGREFSNYEPLRGDNVGALMHHLGPLAPGEERRVIVQLGQVESVEKAMPVIERFREPEEVDAAFARMQAFWEEYLNVCQVETPDPEFDLLVNTHNPRQCYVTLNWSRYLSYYQLGYGARGIGVRDSSQDVMAVVAGAPGRAKKLLRKLLSVQKRNGSSMHQFNPKTMEATMGDAREMEDRPQYYGDDHLWLVFAVCHYIAETGDYAFLEEEIPFYEKDKEGRPLESARVLEHLERAVAFTWNDTGVHGIPHLGFADWNDTVNLKTGAESFFIAHQFSKAARDLADLMDHLGEKEKAETYRSYAEEMKRRVNEVGWDGEWYLRYFDWDGSPIGSRGNAHGKIYTNAQSWAVISGNATPERARKALDAVYTHLNTRYGIKLSTPGYDHYDPNLGGVTTYPPGAKENGGIFLHANPWVIIAECMMGNGARAYQYHRQVNPIKKNEIIDIYEVEPYVFCQNILGDEHPQFGLGRNSWLTGTASWMYQAATQYILGVRVTHGGIVIDPCLPPEWDGFRMRRKVRGTWYEITVRNPEHVSRGVRSCTMDGQAVEVSEGAARIPFDTEGKDHVVEVILGT

SEQ ID NO: 195 - protein, 984 aa, Clostridium thermocellum
MITKVTARNNKITPVELLNQKFGNKINLGNFADAVFTDAAFKNVAGIANLPMKAPVMQVLMENCIVSKYLKQFVPDRSVCFVEEGQKFYIVLEDGQKIEVPEDVNKALRATVSDVKHWAGYLTEDGEHVIDLLKPAPGPHFYVNLLIGNRLGFKRTLQTTPKSVVDRFGRGSFRSHAATQVLATRFDMRQEENGFPANRQFYLYEDGKQIFYSALIDDNIVEATCKHSCNRTVIKYKTACNLEITRTIFLVPHKKGFPLATELQRIEIKNASDKARNLSITYTGMFGTGAVHAIFEDVTYTNVIMQSAALYNDKGEFIGITPDYYPEEFKQDTRFVTMIVRNGDEKSFPQSFCTDYNDFVGTGTLEHPAGGCNLNNKLNRKGPGFFALGAPFTVEPGKTVIIDTFTGLSSSKDNENYSDAVMLRELDNLLRYFEKSESVEETLNEIINFHENYGKYFQFNTGNKLFDSGFNRNLAFQVLYQTFMSRSFGQTQKGYREIGFREIQDLFASMYYFINIGYQDFVKELLFEWTANVYKMGYANHNFYWVGKQPGLYSDDSLWLLQAYYRYIIYTKDTSVLNEEVPVADGNNEKRAVRETLKAIIQYSACISVGDHGLPLLDLADWNDCLKIDSNSIDGATKEKLYYEQLKKTNGKYGDRFMSDYSESVMNAFLLKLAIDHLAEIATLDNDTQLAQQMSELSKEVTDRIQKHAWKENFFARVLINRYKDGSYTYLGAKGDKLSADPNIDGVYFLNSFAWSVLSDVATDEQIAIMVDVIKKYLLTPYGLRLVTPADLNKIANDTATGHYFFGDRENGAVFKHASMMAVVALIKAAKKVKDNELAKEMARIAYFMIDLVLPYKNLENPFQVAGNPRICTQYINTDTGENIGPLLSGTATWLNLNLISLAGIEYTRDGISFNPILREEETQLNFTLKAPKCSYKFSITKPVGFARMESSEYELFVDGQKIDNTVIPMYTDEKEHIVTLKFK

SEQ ID NO: 196 - protein, 984 aa, Clostridium thermocellum; identical to SEQ ID NO: 187

SEQ ID NO: 197 - protein, 818 aa, Vibrio splendidus
MFWLLLIWEGLGIVMMKFGYFDDKNKEYVATTPCTPIKWCNYVGTLDFGGIVDSNGGVLLCKGDPALNRITKYIAQLPNSDFKGSTLYLKVRDEAGNVEVFSPFYTPTLKPLDKFENHTGLSYTTIIAEAFGVRCEATFFVPKADQVLLQDIKVTNISDKALHVDVVPVYEFTHFDALKQLLNADWVPQTMTLKAHQQESGHTVLEQYAFMKRDYAVNLMTADRPATSFDGDRQSFLGNLGYGTWAAPEALNNDELGNTECLRGDNIGALNLRLGWLSPEQTERTIVQIAQEQSLEAALPLLAKYRDHQVVDSAFAELAEHWDGYLQAVQVETPDPAMNSMLNVHNPRQCHTTKNWSRYLSLYQLGYGARGIGFRDSSQDTLGVITHMPEEAREFIERLLSVQNTNGSAMHQFFPSTMEANAGDSREEEDRPDYYGDDHLWIIYAVTQYVKETGNADFLNKEIPFYQKDKAGNPVETGTVWNHLCRAIEFTYTNTGEHGLPLLGFADWNDTVNLPTGAESMMVANMYGKALLDMLDLCELRGEAQLTAKFNDQYQQMQSTVNECGWDGEWFVRYFDEQGLPIGSHKNEQGQIYTNGQSWPVISGFATQERATQALDSVYNKLNTANGIKLSTPGYNGFDPQLGGVSTYPPGAKENGGIFLHSNPWVMIAEAKMGNGERAYEYYRQINPASKNDDIDTFESEPYCYPQNILGDEHKQFGLGRNAWLSGTSSWTYVAGTQWILGVRPEVDGLLVDPCIPAEWPEFKVRRQFRGATYHIHVTNPNNVCKGVVEMKVNGDLISGNKAPVFTSGEHTIEVILG

SEQ ID NO: 198 - protein, 18 aa, Artificial Sequence
  Sequence motif
  VARIANT 1: Xaa = Leu or Ile or Val or Met or Ser or Thr or Ala or Gly
  VARIANT 2: Xaa = Leu or Ile or Val or Met or Phe or Ser or Ala or Gly
  VARIANT 3: Xaa = Any Amino Acid But Ser or His
  VARIANT 4: Xaa = Any Amino Acid But Arg or Asp or Glu
  VARIANT 5: Xaa = Leu or Ile or Val or Met or Ser or Ala
  VARIANT 6: Xaa = Asp or Glu
  VARIANT 7: Xaa = Any Amino Acid But Thr or Asp
  VARIANT 8: Xaa = Leu or Ile or Val or Met or Phe or Tyr or Trp or Ala
  VARIANT 11: Xaa = Arg or Lys
  VARIANT 12, 13, 14, 15, 16, 17: Xaa = Any Amino Acid and up to two of them can be present or absent
  VARIANT 18: Xaa = Gly or Ser or Thr or Ala
XXXXXXXXGRXXXXXXXX

SEQ ID NO: 199 - protein, 26 aa, Artificial Sequence
  Sequence motif
  VARIANT 1: Xaa = Leu or Ile or Val or Met or Phe
  VARIANT 2, 6, 9, 10, 11, 12, 13, 14, 15, 17, 18, 20, 21, 22, 23, 24, 25: Xaa = Any Amino Acid
  VARIANT 4: Xaa = Leu or Ile or Val or Met or Phe or Ala
  VARIANT 5: Xaa = Any Amino Acid But Val
  VARIANT 8: Xaa = Any Amino Acid But Lys or Pro
  VARIANT 16: Xaa = Leu or Ile or Phe or Tyr
  VARIANT 19: Xaa = Glu or Gln
  VARIANT 26: Xaa = Arg or Lys
XXGXXXGXXXXXXXXXXXXXXXXXXX

SEQ ID NO: 200 - protein, 8 aa, Artificial Sequence
  Synthesized Construct
  VARIANT 1: Xaa = Ala or Cys
  VARIANT 2, 4, 5, 6, 7: Xaa = Any Amino Acid
  VARIANT 8: Xaa = Any Amino Acid But Glu or Asp
XXVXXXXX

SEQ ID NO: 201 - DNA, 27 bp, Artificial Sequence
  Synthetic Construct
ttactagtatgggatcatctcaccacc

SEQ ID NO: 202 - DNA, 56 bp, Artificial Sequence
  Synthetic Construct
attctgcagttaatgatgatgatgatgatgtactgtcacttcgactctcacagtag

SEQ ID NO: 203 - DNA, 27 bp, Artificial Sequence
  Synthetic Construct
ttactagtatgaaattcgggcactttg

SEQ ID NO: 204 - DNA, 52 bp, Artificial Sequence
  Synthetic Construct
attctgcagttaatgatgatgatgatgatgtccaagtgttacctcgacattg

SEQ ID NO: 205 - DNA, 30 bp, Artificial Sequence
  Synthetic Construct
ttactagtatgaagtttggctttttcgatg

SEQ ID NO: 206 - DNA, 52 bp, Artificial Sequence; identical to SEQ ID NO: 204
  Synthetic Construct

SEQ ID NO: 207 - DNA, 33 bp, Artificial Sequence
  Synthetic Construct
ttactagtatgtcatttcaaattgaaacggttc

SEQ ID NO: 208 - DNA, 33 bp, Artificial Sequence
  Synthetic Construct
attctgcagttaagtacgaaccgttggttcttc

SEQ ID NO: 209 - DNA, 39 bp, Artificial Sequence
  Synthetic Construct
atgagctctgaataatacgactcactatagggcgaattg

SEQ ID NO: 210 - DNA, 38 bp, Artificial Sequence
  Synthetic Construct
atgagctctgaatggaaacagctatgaccatgattacg

SEQ ID NO: 211 - DNA, 34 bp, Artificial Sequence
  Synthetic Construct
tctacaactgcggttggttaggaggttcgattcc

SEQ ID NO: 212 - DNA, 34 bp, Artificial Sequence
  Synthetic Construct
ggaatcgaacctcctaaccaaccgcagttgtaga

SEQ ID NO: 213 - DNA, 42 bp, Artificial Sequence
  Synthetic Construct
tgcgccaacggttacgatgcatcactcatgaccggaatcatc

SEQ ID NO: 214 - DNA, 42 bp, Artificial Sequence
  Synthetic Construct
gatgattccggtcatgagtgatgcatcgtaaccgttggcgca

SEQ ID NO: 215 - DNA, 40 bp, Artificial Sequence
  Synthetic Construct
ggtgctcatgatctccatcgcaggccagttctccggcaac

SEQ ID NO: 216 - DNA, 40 bp, Artificial Sequence
  Synthetic Construct
gttgccggagaactggcctgcgatggagatcatgagcacc

SEQ ID NO: 217 - DNA, 45 bp, Artificial Sequence
  Synthetic Construct
atcatcgctatggacaagttcgcaaaccaattccacactggtgac

SEQ ID NO: 218 - DNA, 45 bp, Artificial Sequence
  Synthetic Construct
gtcaccagtgtggaattggtttgcgaacttgtccatagcgatgat

SEQ ID NO: 219 - DNA, 39 bp, Artificial Sequence
  Synthetic Construct
tcctccaagctcgctcaggcagtcgttggccgcttcgtt

SEQ ID NO: 220 - DNA, 39 bp, Artificial Sequence
  Synthetic Construct
aacgaagcggccaacgactgcctgagcgagcttggagga

SEQ ID NO: 221 - DNA, 39 bp, Artificial Sequence
  Synthetic Construct
gctcagtttgtcgttggcgcattcgttcttggcctcggt

SEQ ID NO: 222 - DNA, 39 bp, Artificial Sequence
  Synthetic Construct
accgaggccaagaacgaatgcgccaacgacaaactgagc

SEQ ID NO: 223 - DNA, 39 bp, Artificial Sequence
  Synthetic Construct
gccccggcctactccatcgcaatcgcccctcctcactgg

SEQ ID NO: 224 - DNA, 39 bp, Artificial Sequence
  Synthetic Construct
ccagtgaggaggggcgattgcgatggagtaggccggggc

SEQ ID NO: 225 - DNA, 37 bp, Artificial Sequence
  Synthetic Construct
cattaacacgtggttcatttaggtccaaagaaaccac

SEQ ID NO: 226 - DNA, 38 bp, Artificial Sequence
  Synthetic Construct
cattaactcgagcaatgataccaagagacttaccttcg

SEQ ID NO: 227 - DNA, 37 bp, Artificial Sequence
  Synthetic Construct
cattaacacgtggttcatttaggtccaaaaaaaccac

SEQ ID NO: 228 - DNA, 34 bp, Artificial Sequence
  Synthetic Construct
cattaactcgagttaagcaccgatgataccaacg

SEQ ID NO: 229 - DNA, 35 bp, Artificial Sequence
  Synthetic Construct
cattaacacgtgtcattcgacgacttacacaaagc

SEQ ID NO: 230 - DNA, 31 bp, Artificial Sequence
  Synthetic Construct
cattaactcgagtcatgctacaagcgcacac

SEQ ID NO: 231 - protein, 5 aa, Artificial Sequence
  Synthetic Construct
PESPR

SEQ ID NO: 232 - protein, 4 aa, Artificial Sequence
  Synthetic Construct
PETK

SEQ ID NO: 233 - protein, 32 aa, Artificial Sequence
  Sequence motif
  VARIANT 6: Xaa = Lys or Arg
  VARIANT 9, 10, 27: Xaa = Ala or Gly
  VARIANT 11: Xaa = Ile or Val
  VARIANT 15: Xaa = Ala or Asn or Ser or Thr
  VARIANT 16: Xaa = Asn or Ser or Thr
  VARIANT 19: Xaa = Ala or Ile or Val
  VARIANT 22: Xaa = Ala or Gly or Thr
  VARIANT 32: Xaa = Ala or Asp or Asn or Ser
  VARIANT 2, 3, 5, 13, 14, 17, 18, 20, 21, 23, 24, 25, 26, 28, 29, 30, 31: Xaa = Any Amino Acid
YXXGXXENXXXFXXXXXXXXXXXXXXXXXXXX

SEQ ID NO: 234 - DNA, 60 bp, Artificial Sequence
  Synthetic Construct
taaccgttttcgaattgaaaggagatatacagaaaaaaaagattcggtaatctccgaaca

SEQ ID NO: 235 - DNA, 60 bp, Artificial Sequence
  Synthetic Construct
ttcttttcgtcttagcgtttctacaactatttcctttttacacaccgcatagggtaataa

SEQ ID NO: 236 - DNA, 60 bp, Artificial Sequence
  Synthetic Construct
ttgttacagcacaaatcacgcgtattttcaagcaaatatcgattcggtaatctccgaaca

SEQ ID NO: 237 - DNA, 60 bp, Artificial Sequence
  Synthetic Construct
agaagaggcatgcagttttgtctctgttttagctgtgcatcacaccgcatagggtaataa

SEQ ID NO: 238 - DNA, 60 bp, Artificial Sequence
  Synthetic Construct
atactcgtataagcaagaaataaagatacgaatatacaatgattcggtaatctccgaaca

SEQ ID NO: 239 - DNA, 60 bp, Artificial Sequence
  Synthetic Construct
aaggaaaagaagaggaagggcaagaggagcgattgagaaacacaccgcatagggtaataa

SEQ ID NO: 240 - DNA, 60 bp, Artificial Sequence
  Synthetic Construct
tataattctccacacataataagtacgctaattaaataaagattcggtaatctccgaaca

SEQ ID NO: 241 - DNA, 60 bp, Artificial Sequence
  Synthetic Construct
ggcaccttcttgttgttcaaacttaatttacaaattaagtcacaccgcatagggtaataa

SEQ ID NO: 242 - DNA, 20 bp, Artificial Sequence
  Synthetic Construct
ctggagcgtgacatttagga

SEQ ID NO: 243 - DNA, 20 bp, Artificial Sequence
  Synthetic Construct
ttgaagacccaccgtaacca

SEQ ID NO: 244 - DNA, 20 bp, Artificial Sequence
  Synthetic Construct
tgattgcgagatccacgaaa

SEQ ID NO: 245 - DNA, 21 bp, Artificial Sequence
  Synthetic Construct
ccacatcatccacggttctat

SEQ ID NO: 246 - DNA, 21 bp, Artificial Sequence
  Synthetic Construct
accaacaccaacaccaccaac

SEQ ID NO: 247 - DNA, 21 bp, Artificial Sequence
  Synthetic Construct
gttggtggtgttggtgttggt

SEQ ID NO: 248 - DNA, 23 bp, Artificial Sequence
  Synthetic Construct
ctatgagggaaaaatacatgcgc

SEQ ID NO: 249 - DNA, 23 bp, Artificial Sequence
  Synthetic Construct
gcgcatgtatttttccctcatag

SEQ ID NO: 250 - DNA, 27 bp, Artificial Sequence
  Synthetic Construct
attgagagtcaaatataccgactatgt

SEQ ID NO: 251 - DNA, 27 bp, Artificial Sequence
  Synthetic Construct
acatagtcggtatatttgactctcaat

SEQ ID NO: 252 - DNA, 21 bp, Artificial Sequence
  Synthetic Construct
accactttcaacggcacccag

SEQ ID NO: 253 - DNA, 21 bp, Artificial Sequence
  Synthetic Construct
ctgggtgccgttgaaagtggt

SEQ ID NO: 254 - DNA, 21 bp, Artificial Sequence
  Synthetic Construct
ttcggaacgcagtccacccac

SEQ ID NO: 255 - DNA, 21 bp, Artificial Sequence
  Synthetic Construct
gtgggtggactgcgttccgaa

SEQ ID NO: 256 - DNA, 35 bp, Artificial Sequence
  Synthetic Construct
tgctggtttcgagtttgttgatgagtccgccatcg

SEQ ID NO: 257 - DNA, 35 bp, Artificial Sequence
  Synthetic Construct
catcaacaaactcgaaaccagcaaactttgcttgc

SEQ ID NO: 258 - DNA, 34 bp, Artificial Sequence
  Synthetic Construct
cctacaaaacgagtactttatggaacctggttcc

SEQ ID NO: 259 - DNA, 35 bp, Artificial Sequence
  Synthetic Construct
ccataaagtactcgttttgtaggaattttctgttg

SEQ ID NO: 260 - DNA, 34 bp, Artificial Sequence
  Synthetic Construct
ggaacctggtgagtttatcccgggaaatccaaac

SEQ ID NO: 261 - DNA, 35 bp, Artificial Sequence
  Synthetic Construct
ccgggataaactcaccaggttccataaagtactcg

SEQ ID NO: 262 - DNA, 44 bp, Artificial Sequence
  Synthetic Construct
gatgactgctgacccgctagatccagccatgcaagcaaagtttg

SEQ ID NO: 263 - DNA, 44 bp, Artificial Sequence
  Synthetic Construct
gcatggctggatctagcgggtcagcagtcatcatcggctggtgc

SEQ ID NO: 264 - DNA, 20 bp, Artificial Sequence
  Synthetic Construct
accgtattagcgctttgagc

SEQ ID NO: 265 - DNA, 20 bp, Artificial Sequence
  Synthetic Construct
ttcaaagcattggcagcctt
